United States Patent Application Publication US 2026/0191916 A1 - sequence listing, part 74

SEQ ID NO: 541 - DNA, 5107094 bp, Hungatella hathewayii (residues 1,702,366-3,404,730 of 5,107,094)
  source 1..5107094: mol_type = genomic DNA
ggaagtaaagaggtggtggcgtcctccaatgcgatgatagactattcccatgcggctaaaacagaattctatcttccttcccagtggaacctgagtatcatgcccatagaaggctggataccccggaaaagacagattctgtatgcggcagaaagcatacttctgtggcttctcctttcgtcactttttgtcctttcaaccgcgctggcaaaacgatatcagtatgacagaaacatcggcaataccgactggcagaccggaatgctcaacagacaggggattggaaaggaactgaatacatggatccggaagggggaaaaggctttttccgtattttattttgcgttggaggattacaaccggattgccctgcttgcggggcctgagaaagaagaggagtacttaaagagtattcctgtaatcatgaaggattatatcgaaggtccatacgccgccgcccgaatatccggcgagagtttttttgttgctgtaaaagaagagatgacggaaggcgaaatgtctgaatttgccaaagggctgtcactgaagatgatctggaagattcgtcaccaggggggaaaggtgtttttaaatgccaaataccagtacgtttcttatccggaggaagggaatgacgtgaggacgcttctgcggaatctgatcgagaagtactacagcaaactgtttcgggaatcatcggtccgtgaactgacggaaaaatgccgccagcttgctgcgggaagaagcgacgtggaattcggcgaatacgcagaaccctggattacagacttatcccaggcgatcaactattaccggaagcaggtggaacaggcagtttactacgatccggtctttggaatcggaaacagaatgaagtatatccgggatgcggatatgatgattgcctatgatgaaagaagacgtttccgtctgtatggcgtggacatccgttcctttgggaaatataacgagctgttcagtgtggagacgggggatgcgctgctgagggaggtaaccaaaaggctgagcgctatatttggaagtaatctgtaccggattaacggcgatgtgttcctggggatttctcttgatcacgccagcagggataaagagaatgatgagatgatctcccggattcaggaggcttttcgtattcctgttaaggtgcaggaggctgttatcaccctggatgcgttcatcggtgtctgcgattatccggccaatgccaggaagccggagaagctgttagagtgtcttcagtctgccatcaactacggcaaggtgcctgaacatggggtgacggacggtatcgtaatctttaacaacaggcttctggagataagaaggagagagggaaagattcttcagctgatccgggacagtatccatgacgggtcactggaagtatggtatcagccgatttatcagatgaaggcaggccgttttacggcagcggaagcgctggttcgtctgccggatggaactggcggctatatctccgcgggacagatgatagaggttgcggaaagaaacggacttgtctgccagattggggaatatgtgatacaccaggcgtgtacctttatgaaagagaagggggaggcgctggggctggggagagttggaatcaacttgtctgtccagcagcttctggttgaggacagcgcagcacatcttctcgaatcgattaaaaaaacgggtgtccatccagggcaggttgtccttgagattaccgagacgatcctgatacagttcatgtcaaaagcggaagggattatcagggatttatcggagaacgggatcagaatatctctggatgatttcgggattggttacagcagcttaaattatctgatgaatctcccggtgcactcgttaaagatagaccggtccatgacaagtaaaataaacggttcaccaaaacagtacgcattgctgaaagcgattattgccatggcaaaggtcaatgatattgaagtggtagtagaaggtgtggaaaatgaagaagagcggcgcgcgattattgacgcagaggccgattacattcagggcttctactattcaaaaccgctgccgcagacggaactggaactctttttaaccggctttgcggtgagggactgacgaagaacagtagggataaaggatgaaaaatgacgtagtaaaatatgaacggatctgtgaaatattaaaaaacaagattatatgcggccttcttccgccgggaacagcactgccggggcgtgcgaagctgtgcagggagttccatacatcggaacggactgtgagacgggccgtggaggtactggtgcaggaaggttttctggaggtcgttccaaagaaacggcccgtggttgcctgcggttatttggataaacgccgggaggagcaggacgaacgggaaacggccgatgccgttgcggctaatgatatcttaaaatcggggattcttctctgctatccggtcaaccgccggggaatgcttctgtgcagaggcgatgactggaagaccccggagacgatagtggcaaatatgaatccggacgatccgaccggattctggcgcctgtccaaccgtctctggcgattctttatctgcagaaatgaaaatgaactggcactgcgcgcagtggacagcctggggctgggggaggtggatcctctgcctggtaccagggaaaaccggattgattatctgaaaagtttaaaggaattgatccagacgataaagagaggagggagaccggaggaagttcacttcgatgctctgttctctctttatggcattgtcatagaccgtatcgagggggaaccggtctgccgtgtgactccggattcccctttgagggtggggacaaagaatttcgagcagcagttcaggagatcgcaggaacggtattccagcgtgtacctggatattctgggactgattgccatgggccgctatcagccgggcgaccggcttccgacccatgagcagctgcaggagatatacggagtcagtatcgatacgacgatcagggcaatcagagttctgcaggactggggagtggtaacggcggccccgagaaacggaattttcgtagcaaaagatttggaagggctgcgtaagatatatatagcgccggagcagatcgccggtcatgtcaggcgctactttgacagcctgcagctggtggcgctgaccgttgagggggtggcagaacatgcggcactccatgcaaaaccggatgagacgcgccgtatgctggcgcttatggaacgtcagtggaacgatccgttttgccatcagctgataccgctcacactgctggaattcatcacagatcatatccgctacaatgctcttaaatcggtttatgagctgctgctgaagaatttcagcatcggaagagggatccccaaactggtacaaaaagataagacgcctgtaaacagcgaactttaccggcagtgcatggaagcggccggaatgctgaaggcgggggaagagaagcgttttgccgctcgtgccgccgggatatttcagcagattcaccggctggttatccaggaatgcaaaaggctgggatactgggaaagtgcagggaacgtgtatgacggaactgcattatggaagtgactggatggttccggtgaaggattcctgttaaaaaaacgttaataaatgttttaaatccgcagcggacgcaattaaaggttacggcaggagcggtttcatgctatactgtacaggtaaatataaagttatagaaaggactgaggttgatctattgaaaaattccctgctgaaattgagagagaaactgtcggaagcgctgcattccgtgctcccgatcatcgggatcgtcatggtcctgtgttttacgatcgctcccatttcctccagtattttgctgtgcttccttatgggcgcggccatgatcgtcataggtaccatgttcttcacgctgggggcggagatcagcatgactcccatgggagagcggctgggcacagccgtcacgaggagtaaaaagctgagcatcatcgtgatactgggatttgtactgggattcatcatcacgatttcggaaccggatctccaggtattggcggaacaggtgccatccataccgaacaggacgctgattttttcggtcgcgctgggagtgggcgtatttctcgtcattgcacttttgcgcatgctgttcagcatagcgctgccccacatgctgattacattttacatattggcattcctccttacgctgtttgttccacagagctttctgacggtggccttcgattccggaggtgtgacgacgggccccatgacggttccgtttattatggcttttggtatcggtatttccgccatacgtaatgaccgccatgcatcagatgacagcttcggtctggtggcgctctgctccatcggtccgatccttgcagtactgattcttggaatgatttacaggccggctgacagtgcctacattccaccggtccttccggagatcagcaattccgtagaattatggaagctgttccgcgttggacttcccacctatattagagaaattgccgtatcgctttttcccataatcctgtttttcggtattttccagatcgcagttctcaaactttcaaagagaaatttaagaaaaatcattgtcggccttgtctatacgtacatcggcctcgtgctgtttttgacaggcgccaatgtgggctttatgccggccggtaattacctgggacaggtgattgcctccctggattacaactggattattgttctgatcggcatgctgatcggattctttatcgttaaggcggaaccggctgtttacgtattaaataaacaggtcgaagagattacggacggtgccattccggccagggcgatgagtatcagcctttccatcggcgtggccgcatccatcggtctggccatgctgcgggtgctgacggggatctccatcctgtggttcatcatcccgggatatgcgatcgcgctggggctttccttctttgtaccaaagatctttacagccatcgcttttgactccggcggggtggcctccggtccgatgaccgccacatttctgctgccgtttgcgcagggagcctgtaccgctgtgggcgggaatattgtcacggacgcattcggcgtggtagccatggtagccatgaccccgctcatcaccatacagatcctgggcatgatctatcagatgcagcagcggtccgcgccgaaggaccagactttaccggagcctgcggcaggtttcgaccagcttgatgatgatgcaattattgagctttaacagcggcacagatacgatttcgaaagaaaggactgcagtatgagcgaattgtatttaatggttacaatcacggaaagaaccggagtaaagaagtttcatactctgtacggccaccatggagcggatgtcaccttcatcactgtgggaaacggaaccgcggtcagtgagaccctggactatttaggtctcgaggagacggagaaggccgtgatgctgtccatcgtgacaggcactgtgtggaaagagataaaatcggatttacagaagcatttaaaaattgacgttcccggcacgggcatagcctttatcattccgctaagcagcattggcggcaagaagccgctgctgtttttgacagagaatcagaattttgaaaaaggggaggaaagctcattgaaagacacgaaatatgaactcctgattgtgattgccaaccagggatatacgaacatggttatggacgctgcccgggaggtggaggaagtcggaggaaccgtaattcacgccagaggcactggcttggagcgggcggagaaatatctcggcgtctcccttgtggcggagaaggagatggtatttatcgtcgtaaagagtggcatgaagaaccgtgtcatgaagaacattatggaaaaagcgggtcctgcaagcaaggcccgggccgtcgcattttcacttccggtgacgagcacggcgggtatgcgccttatggaagaggcaaaggacgataatgattaggcaggagaacgattaaccatggaaccatactattacagccgaatgaacaggacagagcagagcgcatatcatgccatgaaaaccgggctgacagccctcgctccttccttcgcggttccgcggctggaaaacagagaactggcggatatctttttcaggctccggctggactgccctgagattttttatggaaccggattccattaccggttttaccagaattcaggcagcgtggagatgataccggaatacttatttgacaagggaaaggtgaaggaccatcagaaggccatgaaggccagaatcgccaagctggcccgccctgccgaatcattgacggagtgggagaaggaacggtatatccacgattttatctgcaccggtgtccgctacgataagctgaaaaaaccgtattcccatgagatcatcggtcctttgggccagggggtgggggtctgcgaggggatagcaaagactgtaaagattctctgcgactccctgggaatctggtgcatgatcgccatatccgaagcgaatccggagaagaacatcaaataccgccatgcatggaatattgtgagaatcggcggcagatattaccatctggatgccacctttgacaacagccttggtcatggggagaccatccgctacgactactttaacctggatgataggcagctgttccgcgatcacgagccagccctttatccggcgccgccgtgcagtgacggagaccatttctattacagggaaaagaagctgtccttcacaaagacggaagatgtggccaaacgtgccgcgcaggcggtaaaaaagggaaagccgcttgtgttccactggagaggcggctatctgacgcgggccatggtggaggaactcttaactcttttggaggaggctgcaaaacagaagggaaagcatgtgagagccggacttaactggccgcaggctgtcttttcagcagagttcatcgacgaacttccgggagaagaactgctggtggagacggcgaatgaaggggagagtattgggtaagagaagatacagttaggtcaggaatacaacagtaccgcataaaacatgaaaaatagccgatgaaataattctaccggctatttttgcgttttatgatcatcattcctaataataagaattcggtgaagatgcaaagctgtctaccaccagttccaacagatcgcctcgattgatactttccgaatattcaaagggggttccgtgctggtatgtcgttctgttaaagatcagaagaggggatccggggttgatattcaacagccgtgactccataaaaccggcaattcctgcggagatgatgtctttgccattctcaaaattaatatcgtatttctcttttaaaaagcggtacaaaaagtagatttccccattatactgctccagaccgggggcaatttcgggcaggacgtaactgaccacataggcgaatatcgtgtcgttcaccattttaacacgctgaaggcggtacacatcactgccgttctcaatgtttaatgccctggctactttcagttcggctggaatgatatcgataacggctccctgtgcgctgacggaacagcttccttccaggcgaaattgcgtcgtgaccgaggcctgattttttacactcaaaaatttataaggggtaatgtattttgctgactggagtactctggtgcctcttccctggtgaacttccacgatatgttcgtcccgaagcaggttaacggcgtttcgtatggtggtccggctgacaccatagatttccatcagttcgttttccgggggaagaaaggaatctgtcggatattttgaagataagatatctgccttaatcgcattgtaaaccgatacatattttggcgcatttttatccaagatgattgcctcctttcggtgtgggtccaaataaaaagttgttcatcaggccattataaaagacgtattgaagaaagtcaatagattgcagaaataaagggtatgttttgaatacctttactgtatctgtttcgacctttgacggacaggctgtgatcttcaaggacgatttttgttctaagaaagctgatctgagcttgtccattcaaaaggtccttcgatggtcaccgcaatttggtatatatctggacgaaaactggattcagaatattccataattccctctttccagtaagcggttcgctgaaatgtaagaagcggagatcctggcgtgactccaagcaggcgtgattccagaaaaccggaactggccgaggcgatggtttcttccactttcgtaacgacgagaccatagtattcctgcagacaatgatacaggatgaagaatttcccgctgtactgttccaggcctggggctaaagaacatgggacatagctgatgacataggcaaatactgtgtcatttaaacttttgatgcgctgaatcctgtagacatcagagccaatggcaatggaaagagcttcggcgatttttatttctgccggtaccatatcaacaagggcttcctgagtgatgatttctccttccatgagaggagaaccgcgaaaacttgttgcgtgatttaaatttctgtactcctgaaatggataaggccgcgaccatttcttaggactgattacctctgtaccttttccctgcacagtttttaccagcccatcttcttgcaggagagcaattgctcttcttatggtggtacggctcgcagaatacagttgtgtaagttcgtcctctgtgggaagaagactgcctgccccatagtttctggaagcaattctttcttttatatctctgtaaatttccatatattttaatttgttctttgtctgtaccatcaaaagatacctccatgaaataaaatgaaatgaatcctaaaggggaaacaagtatgtattagataccttatacattactatacatatcataaaatagatacaaatacaacgaaacatacgaaaaaaacgcgttataacaaacgaaatagcaaaatccataaaaataaaggaccataattgtgaaaaaataccattgaaaaatgaggctattatggtaatcttgtaaaagatgaattagatatgaatttgtattttaaatgtatcttaatcgtcagagagtctaaacacaggcagtcacaattgtgaccagaataaggaggaaggtatatgaagctgaaaaaagtattggcagtggctctggcagtgaccatgctgggaagtctgacagcatgtggaggcaacgggggaagcggtgaaacggcggtaaagactccggtggggaaggaagcttctgcagagggggaaaaaattgttaacattgcgatgacgactacaatgggggacttagatccgtttgcacctcctacgcaggggcgtaattttctgcggtacgctgtctatgacaatattgccattttcaaggatttcggaaccagctgggatcagatgcagtgggttatggcaaagaatatcgagcagaaggacgacgtaacgtttgagattgaactttatgattatatacacgatgcgttgggaaatccgattaatgcaaacgatgtggtgttctgtttaaacagcatttcgcaatcgggaaacttcacgaggtttacaaactatatggaatcagccacggtgatcgatgactataatctggaaatcaaattaaagacaactactgtgggagctttcgaatatatgctggcccagtgctgtattgtgagccagaagacatatgaagaatataaggatcagttttccacaaaaccgattacctcaggagcctatcaggtgacagaatgtgtttccggttcctattatgtactggagaaaaatccggattactggcagacggataagaacttgagaagctatgcggccaatgcgtacgaccagggtgttgacaaacttgtttacaacattgtcacggaagccagccaggcaacgattgctcttcagatgggggaagacgatatcattactgtttgcaacaatgcggagatcggttacttcatgaaccaggacggtacaccgactgagggatacagtgtaaataaggtgctatcctcagcccccatgattcttgcgtttaacatggacgaaggccagatgttcgacggtaatctggcgctgcgtcaggctatctgctatgccatcaatcaggaagacatcattgccggtggcttaagagggaatggagaggccatcagggatttgggcgataagctctgcggcgattacaacccggattggaacaatgaagattactatgattttgatctgaaccaggcgaaagcaatgcttgacgaagcaggatatccgggagggattgatccggcaacgggggcccctcttcatatccgcctgctgatcgatcagcagtacaaagacactgcggtagtgattcagagtcagctgattgcagctggactggatgtagagatcaacgcttacgataactctctgctggctacgtatcagtatgacccggctcagtgggatttatatgtattcatacagggaacggagtgttacgtgacaagtatttacgatggaatctttgacgccggtgcagatgggaaagctcccaagtgctttgtaaaagatgaagcattacagaatctggtggaagccgctcatgaaatcagcacacacggcgacgagacagtggaagcgctgcatgattacgtccgtgataatgcatatgcatacggactctatcagtcctatacgttctctgttggacgtgacaccattggtctcgtcaatcacccgtggggacagctggtaggaccggcgtgtgactatacgaattttaagtgaggtctattcaatgggtaaatatattgcgaaaagaattttgtggctgattccggttattatgggtgtgacatttctgatttttacaatcatgttcttcattcctggtgatccggtggctatcatgcttggatccagtgcaacgccggcggagattgaacaggcaagagagatgctgggcttaaacggctcgtatctccaccggttctggaattacgccagcggagtgtttttacgttttgatctggggacctcctttcagtacggaaccagcgttacagcggacatgctgactcgctttccaagaacatttacgctggctgtggccagtatgctgatctccatctgtgtgggggtgccgcttggggtaatcgcggcaacccaccagaatacggtttccgaccgtgcctccatgattattgccatgtttggcgtatccatgccttccttctggctggcgattctgctggtacttttattttccatgaagctggggctgcttccctcttatggaatcggagggctaaaattttatatccttccggctatcgccaactcctttggcggaatcgccggattcgccagacagacgcggtccagtgtgctggagtgtatccgggcggattatgtgacaacagcgagggctaagggggtgagcgagaagaaggttcttatggggcatattcttccaaactccatgataccgattatcacctacgcgggtacacagttctccggccttttaggaggtgccatagtcatcgaaaatgtatttacgattcctggaattggtacctatatggtacaggcaatcaattaccgtgattatggggcagtacagggatctgttattttctcggcgatcactttcagtgtggtcatgctgatcgtggatgttatctacgcctatgtcgaccccagaatcaaagcccagtatgagaataagcagaggagtacaaagaatggaaaaaataaaaaataatactgcgtctgctgctgcgggcggtacgaagagaaaaaatgaatccatgttttcaatctttttgagaagaatggcgagacggaaagaagccatgtttggtctgtccattttgattatcctggcggttctggcaattctggccccatacatctgccgctacaattacgcagaaatgaatttacagaatgcgtttgcaccaccttcgagagagcattggctggggacggattccatgggcagagatatgctttcgagaatcctgtacggcggacgattctccctttctgtcggaatcatctccgtggcgatttcaggaactggagggctgattctgggatcgatcgccggttttttcggagggaaggtggataacttaatcatgcgtttcctggatatttttcactcgattccccaggtactcatggcaatctgtgtctcttccgttttgggagccgggttctttaagacggttcttgcagtgggaatcgctggcatccctaactttgcccggacgattcgcgctaatatcctggccatccgtggactggaatacatagaggcggcggagtctatcaactgcagaaatgcaagaattatcttccggcacgtcatccctaatgcaatcacgccgtttattgttcattgtactctggcgattgccggcggcctgatcgtttcggcgaccttaagctatatcggtcttggtgtccagccgccgctgccggagtggggggccatgctgtctgatgccagatcctacgtgcggcagtatccatatctgatgatttgtccgggtgtgtttatcatgattgttgtcatgtcgtttaatctgatcggggacgcagttcgtgatgcgcttgatccaaagctgaataagtaactcataacaaagaggtgtgtatatgataaataaaaagatcgaaacagattccttcctgtcagtaaaggaactggtcgtagagtatacaatggagggagaggtcgtacatgcggtcaatggagtctcttttcatctggaaaaggggaagacgctggcattggttggagagacgggagccggcaagacgtccattgcaaaggcgatcttacgtgtccttcctgatccgcctgccagagtgccgtccggaagcgtgtatttagatggtgtagatttgctgcagctgaaagaggaggagatgcgaaaggtccgggggaataagatatccatgatttttcaggatccgatgacggcgcttaacccggtcaaacgggtaggagagcagatcgccgagggaatccggcagcatcagaagataagccgggcggaagctttaaaccgtgcctgcgatatgcttaacatggtgggcatctcggatgaccgtgtaaacgattatccgcaccagttttcgggtggaatgaaacagcgggtagtcattgccatggcgctggcctgcagccctgatctgctgctggcggacgaaccgaccacagccctggacgtaacgattcaggcgcaggtgctggagatgattaaagccctgagagatcagatgaatacggctatgattatgatcacccatgacctgggagttgtcgctgacgtagcagatgatgtggcggtggtctatgcaggagagattatagaatacggatccaaggaagctgtctatgataatccctcccatccctatacacggggactttttggcgccctgccggatctgagcaaggaagtccgaaggctgaatcccattgagggtcttccgcctgatccgatccatttgcccgaaggctgcgcgtttcacccaagatgtccatacgccacagaagagtgcagaaaacacccggttcccttacgggaagtagaaacgggtcactggaaccgttgcttaaaaaacggtacagttcagaaaaaggaggattgacatggaggcattaatcgaagcgcgaaatctcaaaaagcattttgattctccaaaaggaaaagtgcatgcggtggacgatgtgtcatttaaaatcatgccgggccgtaccatgggggtggttggcgagtccggatgcggtaaatcaactctgggacggacgatgatccatcttctgcagagcacagagggctcaatttattttgagggagaagacgtgacaaaagtaaaggacaaggaattaaaacagctcagagagaagatgcagattatatttcaggacccgtatgcttcgctgaacccgcgtatgacggtaaaagctatcatccaggaaccgctgattttgtcgaagcgcttctcagacagaggttccttagaggctgagaccgtccggatcatggatttggtgggaatcgaggagcgtttaagaaatgcataccctcatgaactggatgggggacgacgccagcgtgtgggaatcggccgggcgctggccttaaatccgaagtttgtggtatgtgacgaaccggtttccgctctggacgtatccattcaggcgcagattttgaatctgcttatggatttacaggatgaataccatctgacctatatgtttattacccatgatttgtcagttgtacgtcatatttcccatgatatctgcgtcatgtatttaggccagctggtggagacggcgccgtccggtgaattgtttgaaaagcagctgcacccatattccagggcactgctctctgcgataccatcagtggatatccatgcgaagagagagcgaattatattaaagggggagatcacttctccggttaatccgaaaccaggctgcagattcgcctcgcgctgtccctatgtttgtgataaatgccacgagccacagcatctggaggaactgcttccgaaccatttcgtttcctgctgccgtgccagagaaataggtggcctgtaacccggtattcagcagaataggagactagaaatgagcagcagtatagcactaaaaacgagtaaaacagaagaaaagatccccgacaaaatctggaacgcttctttcatcagtgtatttatcgccaatatgctgatgtttatgggacagcagatgatgaacaccctggtggccaaatatgccaaccatctgggagccgcacccatcatcgtgggactggtgaccagcgcgtttgcttacacagcactgatcttcaagattttcgcagcaccagctatagacacatttaacaaacggtatattctggtatttgccatgctgattatggcggcgtcctatgccggatacagcttttccggatccatcccggtacttctggccagcaggcttcttcagggggcggggcaggccttctcggccacatgctgcctggcgctggctacggacactctgcctccggatcgtctgggtaccggtatttcttacttttccctggctcaggttatctgccagtctataggacctaccatcggtctgtcactatccagaacgatcggctaccattatacatttatgatcggggcggttaccatgtgtctggcggcggtggcggccagccggatccgcaacaagcacgtcaaatccgtaaaacggtacagcatttcccttgacagtataatcgccagggaggcgatacttcctgctgtactgatgtttttgctctgtatggtttattataacatcacaacatttcttgtcatttacgcggaggaaaggggatgcggtgtaaacatcgggtattttttcaccgtatatgcggtgacgcttctggttaccaggccggtgattggcagattcggcgataaacacggcctggtaaaaatctttattcccgccatgttctgctttgcgctggcatttctgctgatcagctttgcaaccaacatatggatgtttttgctggctgcctttgtctcggcgtttggatatggtgcatgtcaaccatcagtgcagacgctgtgcatgaaatgtgtaccaaaggaaaagcggggagccggaagctccaccaactatattggccaggatcttggaaacctggtgggaccactgattgcaggctctctggctggtcgcttcggctatgcagccatgtggagaatcatgatcctcccggtagcattagcactggtcatcgtgcttatgttccgaaccaggattaattcagccgggcaggagaaagaggaggcagtttgatgaatcgaaaagactactggtctccggagacgaatccggagacaggagagaagtttgccagagtgctggagtacttccataccgcccataacggaagcgcggatatcgacagcatgattgacagtccatatggagaagcgtgtgccagacggatgcagctccgttttaaatatgaacatgatgccatgggtgaggccgctatggagtattacaggggctgcggtctaaaaaaagagatgtacgacggtgaggattactatgcccgttgggtgatcttaacacctgtggaaatggagacggaggaaggcagaaagaaaaaatatccgattgtcttctataaccacggcggcggcaattccattgagtgcgaggaattctctctgggatttgctgaattagcgggaagagataaatttatggtggcttatttacagaataccaactgggagaactttgagcgtgtgttggagctgatcagtgagagataccctctggatcgggaacgtgtctatctctgcggctattctcaggggggatatcaggtcacatctgcttatttccgaattccatggaagctgaccgcggtgggaccctgcggaaatgatatctacagggaatacgataattttaacgtaccctatacggaggaggaaacacagaatttaaagaatgctctggtgccgtttatgcaggtggtaggagtatgcgaggcctccagttttgttccggttaatgactggaaaccgaggaaggactggggcagagaatgcagcggagaaacgtatctggatgaccgccgcgacgactcaaaggacccgacccggatccacggcggccgccgccggttcagcgatatgccggtaccgcctgagggggaagacaggcacgaatggatgatcggccgtttaaacaagcgcatggataccttaaactgtgaaccaagggattcaaaaacgtgtatctcttatctgaatactccggaggatgaacttcatcacgttctgggattttatggggacaaggaggagattatctggcactacggctataaatattacacgctgaatatctggaacagggagcatattaatgcgttccgctatgttgcggtggaaaacaatccccactggccgccggttctcatggcagaactcctgtgggacttcttcaagcagttcaggagagatggtaagacggggaagattgtggaagaggagtatcgatactgattgactgtaagaatgtgaaattttaataggtttattggattggccagcgaataactacgctggctttttcgagttaaatctaacgcataaagtgtttcattatccggtccgtattcctgcttaaagaagttaagctgaattccggtagtaaaagaaacgcaattatggtaaaatatgtattaaatggttctgtaattacggttttgacaattttcttgacagtttggattgcatctattatagtacaatgtattaatgaaatggaaagataaacaccaaaggatagaaggcagcttaggataaacataaagaaattatatgattagaaaaccgtacacaggaagaaggggagacaatggcttcagaggatgaactttttgccgggtttggcgcagatgcaggcatgttttacagcgcgcttgtcagaagcacggataattatatctatatcattaacatgaagactgatgtcgcgctggtatccccgaatatgcagagagactttgagctggaaggcaggctggtgccgggactcgttaccgtatgggggaatctggtccatcccagggattttaaacggtattcgaaatcgattgaggagatgctggacggtgagaccgatgttcacgatgtggagtatcaggtgctcaaccgtaaaggggagtatgtttgggtatgctgccgcggtgtccttaagagaaatgaggaaggcgagcctgtgattttcgccggagtggtcacggacctgggcagtaaggggaagattgactatacgacagggttgtttaccaatcgggaatgtgagaaggaagtcggacggattttcgacagtgaagaacatgcagagggaggaattcttcttctgggtctggacgatttcgtgagaatcaacgatttgaacagccatatctttggcgatgctgtactgcgccagtttgcacagagcgttcagcagcttcttccgcctgatgcagccatataccggtttgacggcgatgaattcgcggtcgtctatcccggcgccggggaagcggaactgcgtgctctgtatcagaagattcacgtgtactgcaaccggccccataagatcgacgacagttcgtattttctcacggtatccgtcggtgtagccatgatgggcaaagacggtaacggctatcaggagctgctgacctgtgcgctaagcgctctggaggtgtccaaacagaacgggaagaatacagttacgttcttttcgcaggatatgatgcacaccagaaggcgcgcgctggagctttccagccgccttcagctcagtgtgatgaacggtatggagtcctttcatcttgcctaccagccgtttgtgcattcggataccctgcaggtttctggtgcggaggctctgcttcgatggtcctgtgagccctacggcgtggtttctccggtcgagttcataccgcttctggaggcaggcggcctgatcgtacccgtcggaaaatgggttctggaggaagcggtgcgaacctgtaaaaagtggctcacgtatcagcctgattttatcatgaatgtcaatatttcgtatctgcagatgctcgatgagtcatttatagatttcgtgaagcagactttgaatcaatacaatcttcctcccgcccatatcgtcctggaactgacggagagctgcttcgtcacggatatggaggcgcttaaggaagccttccggctccttcgcaatttaaagatacagattgccatggatgattttggaaccggttattcctctctgggcatgctttcccagtcgccggcagatatcgtgaagattgaccgtctgtttatcactgccatcggagacaaagagaatgaatttaaccggtcgtttatcggttcggtgatccagctctgccacagagtggggatatccgtatgtgtggaaggcgtagagcgtaagaatgagctggatacagtctgttccttagaggccgactgcattcagggatattacatatcgaaaccactgcttcaggaggaatttgaaaagaaattctgggaagcatgatttcttgaaggaacggtaacattgaaggaacggtaacagagaagaggccgcggcaggtctcttctttctatttatctgccaaaacagatggattatttccagaataatggcaaatttggtaaaaactttagaaaattataagaatttattgttgtaaaagattatgagatgccattataatgggggagaatggagcgagatattaatcaggaggaaagagacgtatgaaagacgaattcaaccacgtggaaatagacggtaaagaggcggacgccatccaggtaaagatggatgatgtcgtagccgatgctgagaagtttgcggcggaagaaagatcagcggatccggaccggaaccggaagggcggcgcggagtctgagccggagatggaagaacagatgagcgacgaggagtttaatgaagaactgaaggagctcatggaggaagacaactccggaaagaaaaagaagaaaaagaagaaaaaaggagaacggggacgcaggaaaaaatggagcgtcaggaagaaaatccttgtcggtgccggagccgcagtggtagtcatttttggtgcttccaaagtgatgggcggaggcaaggcgccccagatgatggccgccacatttccgctgagcaggggcgaagtggtggagatgctttcggtcagcggccctgtggagggaactgacagtgtggaagttgtatccaatttacacgcggagattctggagattccggttaaagaaggagaccgtgtggaaaagggacaactgctggccactctggatgagaaggacgcgaaaaaagaagtggatatcgcccagaacgcctatgaccttgcagtgactacatacaatgaaaaacagatcgaggctgagaacggctatgcgaaggccaggcaggactacgatgcggcaaaggccaattatgacagaacgaacgtattgttccaggcgggaagcgcatctcagctggagctggagaatgcttccgatgcactgaacaacgcgcagcgcgaactcaagacatttacgctgaaagacggcagaccggtggctaacgaatcgtattcccttcagattgagaatgcggcgtttgaactggaccagaagaaggaacttctggccaacacaaaggttaccagccccatcgccggcaccgtggtccgtgtgaactgtaaggtgggccgtttcgcagataagacggatgacgacaagccgatgttcattattgaaaatctggatgtcctggagatgaagatcaatgtcagcgagtattccatcggcaaggttaagatcggccagccggtagagatcagtgcggatattttaaacggagagaacgttaagggcgaggtgactgccatttctccgaccggtgaggagaagggaaacggctccacggagcgtgtaatcccgacgacgatccgtattattgatcagaatacccgcctgatcgcaggaattacagcgaaggcgaagattgaacttcagaaggcagaggatgcatgggtagttccggtttcggccctttatcagcagccggatggcagcaccgcgatcgtagccgtagaagacaacattgcccatatgatccccgtgaccacaggagtcgagagcgatatccaggtgcaggtgattccggcagaggaaggaaagctgacagagggaatgcagatcatcgagacaccggcggcgtatcttacagacggcatggccgttgtagctgttccggctgcatagaaaaggaggaagcaatatgtggaaaagggaaaaaaagcttccttcctgcacgaacgaaaaagcctcggatgatctgatccggcttgtagacatggtgaagatatacgataccggttccattaaggttctgggcttaaaacgaatcaacttaaccattaagcggggagagtttgtggcgatcatgggtcagtccggttccggaaaatctaccctgatgaatattttgggctgcctggaccggccgaccatgggccattattacctggatggaatcgatacggctgacatgagtccggatgcgctgtctgcgatccggaacagaaagatcggctttgtattccagtcctttaacttaatttcgagaacatcggcgctgaagaacgtagagctccccatgacgtacgctcacaaatccaagaaaatgagggagcagcgcgcgttggagcttctggaacgggtgggcctgggagaaaggtatgaacacatgcctaatgaactctccggcggacagcggcagagggttgccattgcgagggctctggcgaatgaaccgccgctgatcctggccgatgagcccaccggtaatctggataccgcctcctctgtggaaatcatggagctgttttcccggctgcataaggaaggcgctacggtagtcgtggttacccatgaggaagacatcgccgcattcacggaacggataatccggttccgggatggccaggtagtgagtgacaagcggaatattccgaaggaacttacggaagaggaagcagttaaaatgaagaaagaagggacgccatgctgctagaaaatatgaccatggcgctccacgccatccggtctaacaagatgcgctcgtttcttaccatgctgggaatcatcatcggtatcgcgtcggtgatcgccattgtttccgtcggtgacagcatgcggtccctctatgcggatgcctataaaaatgtgggggtaaaccgggcggttgtactggtatcctggaatgtggatgatttccggatgagtgattatttcactctggatgaactggaccgggcaaaggaagtatttaaagacaagattgcatacatggacagcgacgcctatgccagcaccgatgcggtttatggcagaaataaggtgaaatacagctttcagggcattgattataattatccccaggtacagcccatgaatattatctatggccgtgaactgaacgaagctgacgtaaagggacgaagaaataatgtagtactggaagacaagggcgcggagatgctgtttggaacagccaactgtgtcggcagaacattccgtatgaccatcaataagtctacggaggaatttaccgtggtcggtgtctaccgcaaggatttgtctccgctggaggcgatgatgatgggcaacggacggacgcagtcgggctttataccatacacgatcctcacgcgtcccagcgattacttccaggatttaaacttttatgtaaaagacggagtggatatgaaggcatttctgcctgagattgcccgctacgttgcaaagataaaaggaagaccggtatctgaaatcatgacccagtcggttgtggaacagatgggaagcgtggataccgtactgggcggaatgtctgccgcggtaggcggtattgcagcgatttccctgctggtaggcgggatcgggatcatgaacattatgatggtgtccgtcacggagagaacaagggagatcggaatcaggaaggccctgggagcccgtacccgcgatatcatgatgcagtttttgacagagtctgcacttatgtcggcctgcggaggcatcatcggaatcgtactgggagtcgggattgtcacgattggcggaagcgccatggggatggttcctgttgtgaaggtatctgtaatccttgtggcggtaggattctccgcactggttggaatcttctttggactgtatccggcatcgaaggcggcaaaggccgatccgattgatgccctgcgctatgaatagggaaaggagagaccatcatgctgcttgaaaatatgtttatggcactgcatgccatcagagccaataagatgcgttcctttctcaccatgctgggaatcatcatcggcatcgggtctgtgatagcaatcgtgtccataggagataccatgcgttccatggtagccggtctgtacgccaacgtgggcatgaccagagctctgatctatatctggccggccgacggcagtgaccagcgggacagtgactactttaatatggaacagatggaacggatcaaagaagtgtttcaggacgatattgaatatatcgacagcaacgcctactacagcggtgaggcgcttcacggccgcaataaagtgaaattccagtttcagggaatcgattacaactatccggatgtacagaagattaatattatttatggccgcaatttaaacgaggccgatgtcaagggccgcaagaaaaatgtggttctggaatccaaaggggccatggagctgttcgggacggaaaatgcggttggaaaaacgttccgcaccaccgtctacggcgagacggatgattacaatgtggtaggagtttataagaaggagctgactccgatcgaggccatgatgatgggaaccggtcagaccaaggaagcatttattccgtatacgattctgacatggcccaacgattatctgttccaggtgaatctcttcgccagggaaggaacggatatgaaggaatttgaagggcggatcgtcccttatatcgcgaggcttaaggaccggcagcctgcggatgtgacattttactcggcgcttgacgagatgagcggtatggataccatgatgggcggactctccgctgcggtgggaggcatcgctgcgatctctcttctggtgggaggcatcggtatcatgaatatcatgctggtatccgtcacggagcggaccagggaaatcggaatcagaaaggctctgggagcgagaacccacgatgtcatgatccagtttctgacggaatcagcgattttgtccgcgtttggaggaattctgggcgtagtcatcggtgcgggactggtcatggcaggcggagcgctgttcggtctttcggtggtagtaaaaccccaggtggtccttgttgcagtaggtttttcggctctggtcggtctgtttttcggtctgtatcctgcgtcgaaggcggcgaaaaaagaccccattgacgcgcttcggtacgaataaaaaatttcgaaatcatgaagaaataagtgtgtgcagccgggaattttcctgtattttacagggattttcccggttttgaactttacaaaattataaaaatctccagatggggctcgccaagtaaaaagttctatgctataataagatgatatgttacggtgtattgaggagagcctatgctgagtgaagaaaaaatcaaaatcatgacgaacctcgccatgttcgaaaaaaatgaggggaacaggatatttcctgtaaaccggtattttaagagtgattatatcagcagcaaactgctgcgttcctttttcagttataccctgagcttccttttaggccttgtcatgtgggtgctctgtgatattgagaagtggatgaatgtcctgcggattgacactctgattgaagtgggcatgaaggcgggcgtgatctatctggccggacttgtggtatatctcatcataagcctgtgtgtatatgcgaagcggtacgactatgcgagccgcgggatgaaggtctatatggcaaagctgaaaaggctggacaaacggtatgaaggcaattccagacccggagcacggactaaaggaggacggacccaatgatgagtcttctcgtattcaaggaacgattaaaggaattttatacaaaatttgacatctatatcacgccggtaatcaagtttgtgtacagttaccttgcgttctggctgatgaaccggaatattggtttcatggcaaaactcacgaatccgctggttcctctggtattggctctggtgtgttcgtttctgccctacagtgctgtaagctttctggctgcagtgtttatgctggcccacttatgggcggtatcctttgaggttacgctggttatggcggtgtttattctggtggttgcacttctgtattacggcttccatcccggtgacagctgtctgctgatcctcacgccgatctttttcgtactgaagattccatatgcgattcctctgattgtcggcctgtcaggcggtatcgtttccgtgatcccggtgggctgcggtgtttttatctactatacgctgctgtatgtgaaacagaatgcaggagttctgaccaatgagttctcagctgatatgatgcagcggttttctcagattgtgaagagtctcttcggcaatcaactgatgttagtgctgattgcggcgtttgcggctgcgattgtagtcgtgtttattcttaagaatatgtccttcgattactcctggatcatcgctatcgtggcgggaaccatcgcccagctggtggtgatttttatcggtgatatcacgtttgatgtatcagttccggtaagcgagctcattataggagtggcagtctctttgattctgtccgggatttacacgtttttcgtcttcgcagtggactactcgcggacggaatacgtccagtttgaggatgacgattattattattacgtgaaggcagtgccgaagctgacggtgagcacgcccgacgtaaaggttcagaaaataaatgccagaaaactccagagaccacagcgttaggcgaaactggaaaaagggaggtggactttcgtggcagatattatagatggattatattcctgggtttcattcttaccaaggataaccaagacgaatctcattgagattattatcatagcagtacttctgtatgagctgcttgtctggattatgaatacgagagcctggactctcctaaagggaattctgttaatattatgtttctatgtgctgacctatattttccgtcttgataatatcaagtggattttgaatacgattgcgacgcctgcggtgacgatggcgatcgtgattttccagccggagcttcgaaaggcgctggaacagctgggaagcagaaacccgctcacaggaattcttacctttgatgacgggaaggataattccggttttactgacaggaccatcaacgagctggtgaaagccacgtttgagatggccaaggtgaagacgggagcgctcatggtgattgagcggggcgactccttaaaggagatcgagcgaaccggtattgagattaatggtctggtatccagccagctcctgattaatatattcgaacacaatacaccgcttcacgacggcgcggtggtgatacacggaaacagggtggcggcggctacctgctacttaccgctgtccgacaacatgtccatcagcaaggagctgggaacgaggcatcgtgccgcggtcggcgtcagcgaggtgactgacagtctgaccatcgtggtgtcggaggagacgggacgcgtgtccgtcgcttcggaaggcggcttaaagcgcgcggttgacgctgatgcgctgcgggaactgctcatggatctcaaacatgtggaaggagaaggaagcagatttaagatattgaagggaaggcggaaaaatgaaggaaaaattgctaaataatctcggcctgaaagtcgtttctctcgttcttgcctttgttatctggatggcgattgtcaatatctctaatccagttgtctccggacagccgtttacgattccggtggacgttcgcaatgaggaaatcctggataatgccaatctgacgtatgagattgtcgaaaaggacagcgttacggtgaattaccaggtaaatacgagaaacagttccctgtttcgggcctccgatttcagcgcgtatattgatttaaaggactataacgatgtgactggcgcagtgccgattaccatagaggtgaataaaaacaaggaatccctgatcagagacggggaagtgacggccaagccgatggttctccatgtaaagacagaagccatgcagaacaagaaattcgacttaaaggtgaattacgtcggagaagtggaagacggttatgcgtcgggaattaccaccctgtcctccgattacgtggtagcccgcggtccggaatccgtgattggccagattgcttccatcggtgtggaaatcagccgggaaggcgccaacgcagatctggagggcgatgtagtacccaaatgttacgatgccaacgataaagaattgacggatctcggagataagctgacaattactccgaacaccattcattataatatggcaatcctgaaagcaaaggaactgaccctgaattttgaagtgaaagggacagtcgctccgggataccggttcacaggagtggacagtgatttaaaatctgttcctgtagtagcgacgaagtccgtgctggcgtcagtcaatgcgctttccgtcgcggatgataagcttaccattgaaggtgcgactgcagataaggtgatccatctcgatctgaacaattatctgccgccgagtacggcgattgttccgaacgctcagagtgaggtaacagttaccctgaaggtagaaccgctgactacaaagtcctatactctgaatctggccgagctggccagccgcggtaccgaccccgattatgagtataccttcagcagagacagcgtggatgtaaatatcagggggctgaaggaggatctggatacactggatgtcagtgatttgaatgccgtgctcgatatgactggccttgagcctggaacccatccgggaaagcttgctttcgaggtgggagaaggatttgaagtggtgaattattctgactttgatgtgatggttgttgctgatggtgaggatgagagcgaaggtcccggacagacgactgctgaccaggggacagatgaaccggcaaccgccggcacttcaaaaaaagcagcagaataagaatgacgatgtgtggagggaaataatatggtcagtgctaaagttgtcataaagaatcctaccggccttcatttaagaccggcagggattctttgtaaggaagctatgaacttcaagtcttcggtgaattttcgttttaagaataccaccgccaatgcaaagagcgtgctcagcgtattgggcgcctgcgtaaaaagcggcgatgagattgaattcgtctgtgagggagtggacgaaaaggaggctctggctgccatggttcaggctgtcgaagacggactgggcgaataaatctattttataattaataaggaggtcttgttatgatgaaaggaacaagcgcatctgcaggtatcggcattgggaaagccgctatcgtggaagagacagaactggtaattaagaaggagacgatctcagacgcagcagccgagaaggaacgcttccaggcagccttaaaacaggcgatggaggagacggaggctctggcgaaggatctggccacgagagtgggggagaaggaggcggagattttaaacggccacttaatgcttctttcggatccaatgctgacaggtgagattgagaacacgattgcaggggagaatgcatgcagtgaatacgccatcgagaatgtctgcaacatgtatgccgatatgtttgcctccatgggagacgagctgatgcagcagagagcaaccgacatgcgtgatattaagacgcgtatgcagaaaatcttactcggtgtcagttccgtggatatcgcctcactgccggcaggcagcgtcatcgttgcgaaggatttgaccccatccatgacggccggcatcaatccggcaaatgtctgtgggattgtaacagagttaggcggaaagacctctcacagcgcgattctggcaagagccctggagattccggcagtggttgcggtggagggctttttaaacagtgtgaaagatggagacaccgtggttctggacggctcggaaggcgttgtatttgtgaatccggaggaagctgtcactgcggaatatgaggcaaagagaaccgcttatttaaaagaaaagaaggaactggatcagtacattggcaagccaaccgtaacaaaggatggcgttaccatcgaactggtggccaatatcggaaaaccggaggatgtggataaggttcttcagtatgatgcagaaggaatcggcctgttccgtacagaatttctgtttatggaccggaattccatgccgacggaggacgagcagttcgaggcgtaccagaaggtagccatcgccatgaacggcaagccggtgattatccgtacactggatatcggcggtgacaaagagattccttatatgggattaaagaaagatgagaatccattcctgggataccgggccatccgtttctgcctggaccgcagggaagatgtatacagaccgcagcttcgtgcacttctgcgcgcgagtgcgttcggcaatatcaagattatggttccgatggtaacctgtctggaggaattccgggaagcaaaggcaatgattgaagaaatcaaggcagagctggattccaggggaattgcctataagaaagatatccaggtgggtatcatggtggagacagcagcagcctccttaatggcggatgcgtttgcaaaggaagtagatttcttcagcatcggaacgaatgacttaacgcagtataccatgtcggtggacagaggaaatgataaggtatcttatctgtattcgccgctgaatcctgccgtactccgcagcatccgccacatcattcagtgcggacggaaagaggggatcatggtcggaatgtgcggggaagcagccagcgatccgctgatgattccgctgctgctggcatttggcttaaatgagttcagtatgagcgcttccgcagtcttaaacgccagaaagctgatcacgggctacagcatcgcagaactgcaggccattgctgataaagccatgtcattcgtgacagcgggcgaagtcgaggcatacatgcgcgaacagcagtgagcagtgcgaaaacgagcgaatgcccgcgaccgacacgaagcggagcggagtcgaggtgcactgcaaagtcaaagctgaatttacgaattataaaatcctgaaaggaaggcagctgtcgcattggcggctgccttcctgtgatgaaggagagtaattaattatgggtgtttatctgatttgttacgcagccagttatctgtttgcgagggcggggtattactggctttcgggccttgttttaatcctggctgcgctctggctgtactggtatgattacaggaggacggagaatatcattcatcttcgtggccttttttccctgttctgggttggcggccaggggattgcgtgtctgaagctgtctgagctttcgtcggactggaatattgtcacctggctctgtttcctggcggcgcttttgggcttctgggtgacgtatgagtttttgatgcgggcacagggcgagtcaggaggccagcgctccagatggtttaatttccagggatatgagaggccgctgttctggtctatggtcatcgttaccgcggtgtctctgggcgcgtttctggcagaggctctgatcctgggattcgttccgtttttcgtgcggggcgtaccgcatgcctattcgaccttccatatcacgggagtccactattttacggtctcatgcgttctggtaccggccttgtccgtgctctatttctgcattgagcagggacggaacggtgtgcgtatggtgctggtaatccttatggacatccttgcctgtgcgattccggttctctgcgtctccaggttccagctgattctggctgtgggactggccgtgctcacgtatattgccatggacaaccggctgaagatttcctatgccataggtctggtgctgggaatgataccgatctatgtgctgctgacctttgcgagaggccatgacgtctcgtatctgaatgggatattccagatgaaaaacagtgagatgccgatctttatcacgcagccgtacatgtatatcgccaacaactatgataactttaactgtatggtggaatggcttccatcccacaccttcggccttcggatgctgtttcccttatgggcgctgaccgggcttaagttcctggtgccatccctggtggattttcccatctatgtgacgaaggaagaactgacgacggtcacgctgttttacgattccttctatgatttcggaatcgtcggcgtcgttctgttcgcctgtattctgggtatggctgcatttctgctggtccggatgatgaagcggatacgcaatccggtgggatatctgttttatgcccagtttgccatgtatctggtgttgtcttttttcaccacatggttcagcaatccggctacctggttttatttgatcgtgacaggcctgctttggggcttttgttcctggcgtaatgacggaagacacgggtaatcctgagaggcgggagaatcccgtgtctttcgcctgttatccggcatcagggccttgcgtatttcgcagggccggtatttacagaaagaggagtgaaaatggaaaaagaagatatcagagtaacacacgtcattatacatattctggattccaccgtggggacggcggtgatgtcggggggccttttagagcatggttccgatttttccgattttgtgagaagccatatttaccgggtgatgaccagtgacgaggggaaatcctgtcagtttgacggcgattctccggtataccagatggtctcggagatggatgaggacacgtttatccagaagtcccaggagatcgcccagaagctgtttgacatcatgtattccaacatcgatattccgtctgcggatttgatggtagtgcgctacgatgcgggacagcagtgcggcattgccctgcttaagatgaattacaagtcatcctatacccatatgacaaactatacggaaaatggaaactgcaacgacattatccggcagaatgctattcttccggcggaaaatcagaagctggctgaggcgtgcctgatcgacttaaatgattattcgctgcgagtgatggagaagaagtatgaggttaacggcgtgaagaccaattacttttctcagatgtttctgcagtgccacggcagcatgtctccgaagacggagctctctatcgttaccagggcggtggaacaggttcagaagggatactatgatgagtcggaacagtgggaagcccatatggaggcgaagagcatcttaagccaggaactggcggaacagggaaccatcgatatcccgaccgtagcggaaaagatcttccacgaaaaaccggaactgaaggaagaatttacggaaaagatggaaaaatacaatctttcagaaaaacaggtgacgcctcagaatccttccactaccagaaagtttgaaaaacaatatctgaccacagataccggaattgagatcaagattccaatggaggaataccagaacaggaattctgtagaatttatcacaaatgcggatgggagcatatccgtgctgataaaaaacatcgggagtattaccagcaggtaatattcccgatgttttttatcacggaactgtatttctgttctatcagtcccggctgtcatcggaggtgtcatcctgttctgcgtcaggcagttcttcagacttccggggagcggatgatctgactttttcttcttctgaaatccggtaaatcttccggttatgacgccgtactgccgaaaggatgactgctgcgatgacagccagcggaatccagaaaggacaggtggtgataatgaagatcaggagattcgtcagggccgtgatcagggactcgaagtttttggcaagcccgtttttcattctcgttccggctgattccggggcggcgggcgtataacttgttacctctgcgatgtttaaatagacggtactgtagtctacctggttgtcatagagacgaagctgggattccatggattccagctgataccggatatcggagagacgctgctccagtgtgatgacggtgtcgatggactcagctttctccaaaaactgccagatgcgctcctgctcgatttccagtgattttttccggctttccatgtcactgtactggagcgtgacgtcctgggtggattctgatttgttggtgacatttccgctgtcactgacggctcccacaaaacggtccagtttatcgtcgggaatacgcgcggtgatgttggcgtaccggggaatgggttggccccgatagtttaagctggtgcctgagatatcagactgttctgtgtagccgcccagctcagacagtttggcattgatgccggatatcatcctgtcgaattcctctgtctccacctgcatggtgatattgcggatcagcttgcggccttccggcagcttcggggtactgaaggattctgtgttcagcgtggtgccgccttccgccttctgggatgcatagtcgtagctttcggaatcgttcgatacggtttcagcggccgtttccgagtaggccccggttgtctctgcaaccatcacagatttgctggctgccccgcatgcggtgattcccactgcggcggcaaagaacggaattaaaaaataaaccatttttttcataatgattctcctccctgagaatggattgaatttggttctgattagagaataccatggcggaaaatggattgcaatggaagtaataaaggattaagaaaacattagatctttagaaaaatattaagaaaaaatgaaaaagaaacagataaaaacaaaatagaagaaaaaaaacgaacacttgacagtctatataaaaggcggtaccatagtcttataaaaaaggaatcgcacgggatttttacgggagactccggtgcgggaaagggagaaacaagatggggaaaaagtggataacggcggttcttgccgcagcgctcagcgtggcgatggcatcatcggcatttgcagggacgtgggagaatcaggagggaagatggaagtatcacaacgatgacggcagctatgcggcagcccagtgggtcgaagaccagggaaactggtattacgtagagcaggatggctttatgaagaccggctggtatcaggacgcagccggagtctggtactatctcgatgagaatacgggagccatggcttccaatactaccaggaatatcgggggaaccgattatacgtttgacggttccggcgcgtggatgcagccgcaggtacggttgaatgacggctggaacggaacgacatatgtgaaccggctgattggatatcagatcacgcttccggattcctatcaggctgtttcgggaaattctgtttccctgccggaaaatgcgcagtatgacatggttgcagctgcaccggatggaaacagcatcattgttaccgcggttattaatatgtccgaactggatggagaaaactggtccgacgaggaactggcttactattttaaatacatatacagaagtgacagcgatgtcatcggtgcgtcattcaacgatcttggctttgcaaagattactctggtacagagtgaggacggggttgccgacgtctatttcagacgctgcggctcctatgtcctgatgatcgagaccgtgtttatcccgtcgagatggcaggagattgatcaaattctgcatacgatgaagatcccggactgacggatcagcaactgtcacgtgtaagtgaagcaaaaggccctttcggcaggcagcctggataacgggctgcctgctttacttttgccttgcatcggaaggcgtggattcaaagtacttcttatacgccctggaaaatgtagagtagtttttaaagccgcagtcaaagcatacacttgtaacgggtgttccgctgcgaagcagatcacgcgccagaagcaggcgcttttctgttatgtagctgcccagagtatagccggtagcctgcttaaataagtgcatcaggtggtagcggcttaagtaagcggcatcggcgatctgatccactgacagatcttcggtcagatggccggaaatgtattccatgaccgctgagattctgcggtcgccggtaccgggagagagatattccacccgtccggtcagggcagcgcggtttagcttgatcataaattccagaaatactacctggcagtacagttcttttgcatagccgtcgtgagcgcaggcgtattctaagtcggtgatggttttgaacaggccgcttttctccagggagtgaatccgcagcacgttggaacggagctccttcgctttgtggaagcagtcgcttaagtcataggtatcggaacggtaggacgtgatgaagcggggggagaggtagacgatgatccgttcatagggaacggatggatcgatgtccggtctgtgtatatcattatggcttaccagcacgatatcatagggctgcagctgatactcctggccttcgatccggtaggtgacacggccccgtatgaagatgataatcttatcaaaatcatggtagtgatattcaaaatcctgttttttggtatcggtcaaatggaacagccggaagtcgctgtttaagtatcctcttttttcataaccagtcataagttcaaggttcctttcgtctgttagctctattatacaggaataaacacaatatgcaataaaaacagcataatatcgatagaagtgttaaataatgctgattataataaagggaaagaagataggacaaaagaagggacacataatgaagattattgttttagctggcggatacagtccggagcgggaggtatccctgtcctcgggttccttaattgccaatgcgctgatggagcagggccatgaagtgttttttctggatccctggcctggaataagggagggggaggaagtccgttacagaaccagggaagagggatatcatttttccagtgaaatcggtatggaggctcctgacttggaaaagcttagagcagggcatgggatgaaaaagacgctgattggtcccggcgttcttaaagcatgccgggaggcggatatggtgtttatcgcgctccacggcggtgcaggggaggacggacagattcaggcggttctggaggcatacggaattccacatacgggaagcagctggaagggctgcctgctggcgatggataagaatatttccaagatttttatgcggatggccggagtggcaactcccgactggtatcttgcagaaaaggggaaaaccagccggccggatttcctgccctgtgtcgtaaagccgctggactgcggttccagtgtgggagtcacaatcgtggaacgggaagaggagtggtctgcggcgctggaagctgcgttttcccatggcggccgcgtgctggtggagaaaaagattacaggaagagaattctccgttggcgtactgggtgacagagccctgcctgccatagagattataccggagagtgggttttacgattatcaaaataagtatcagcccggcatgacaagggagatatgcccggcctggatcgatggcatgcaggaagtaaagatgaaggaaacagccctgacagtccaccgtatcctggagctgggatactattccagagtcgactttatgatggacgaagacggcgccatttactgtcttgaggccaatacgcttccgggtatgacgcctctcagccttcttcctcaggaggcgaaggcggccggaattacatatcatgaattatgcgaagcaattgttaataatgggaaaggagccgcattatgaagattacgttagaaaaataccatggactcggaaacgattacctgatctttgatccgaataaaaatgaatggaagctcacaaaggaggcggtacggctgatctgtaaccgcaacttcggcgtcggatcggacggcctcctcgtcggcccgatattaggggaaaataagatggaggtgaagattttaaatccggatggcagcgaggcggagctaagcggcaacggtgtccggattttcggaaagtatctaaaggatgcaggttatgtacagaagaaccattttgcggtcaacacgttaagcggggagcagcagattcattatctgaatgaggaggggacgagaatcaaggtttccatgggacatttgagtttctggagcgacgaaatcccgatgacggggccgaggcgggaggtgctgaacgagacgctgacgtttggcagcattccgtaccgggtgacctgcgtctccatcggcaatcctcactgcgtaatctggctgaatgatatttcaaaggatctggtctgccggatcggccgccattccgaagcagcggactgcttcccggagaaggttaatacggaacttctgagggtggtggacagaaccaacatcgaaatagagatttatgagagaggcgcgggctatactctggcttccggaaccagcggctgtgctgctgcgggggcggcctataagatgggacttacagatcccaaaatgtacgtccatatgccgggtggggttctcgaggtggaaatcgaggaagacggctccgtcctgatgaccggagacgtaggctatgtggggaaatttacactttcccatgagatgacagagcagctgcgcagtttgtagaatactataacagatttcaggagaagggggaccggtttcagacggtatcccttctcttttccttttttatctgcgtttgccgatgacggtgaaggaccgccgtaccggacagcagaccataaacggaaacatcaggataaacagaaacatcaatcccgttttgttgacgtattgccgcttcatagattataatagataataattgtgattgaatgtctgcagctctggctgcggcagggaggcggggttatgaatcagttgccagcagctggagaaggtaccggcatttatgtgatagatggagaattcagagtagtctattttaatgaaacagcaaaggcggtttgtccgaatctgagagtgggggatctctgctaccgggggatctgtaatggaagtgcaccatgcagcagctgcccggacaggaacgaggactgcagcaggcttctgctgtacgatgcggtaaaccggcagtggatagaattatcttcggggcggattgaatggccggggcacgggaggtgcaggctgatgctctttaaggtcgtggaccggcagagtatgagtctcttttacgatttgacggagaccagtgcctatgaggagctgttcgaactgaacctggcagagaatacctataagatactctttcaccagaatggaaaatatgtaattcccgacatggagggcagactggattccatgtgcatggaggtggcggatcatatgatctgcccggaggaccgggaacgtttcctggagttctggaatttcgatacgctggctcagcggctgagcgggaacaaccacaccataagaggggagttccggaaacttcttgtatccggggaatactgctgggttgcccagacggccatacagctgcatacaggggagcaggataaaacggttattatggttttcatccaggacatcgacaaacagaagaagcaggagattgcggccgcgaacagcggaaagagcggactggaagaaaaggattccatgatgggactgtaccgttatggcccgtttctcgagagggcggaacagttccttagggaaaagagcggaagtaagttcagcatggtcgccatagatatcgaacattttaagctgtttaacgagtggtacggggaagaggctggggaccggtttctgaccagcattgcagagcagttaaaagaagtggaaaagcagtatgattccatggccggttatatgggaggcgacgattttgccatcattattccgagagaggaatcggttctccggaacctggagcggggaatcaggcattttgtgaagcagtatggggggagcgtcggcttccttcccgccttcggcgtctatgagattgaggagtgggacgtatcggtcagtatgatgtatgacagagcctccatcgccctcgcctcggtgaaaggaaactacctaaaccgtatgggacggtacgatgccggaatgaaaaagaagatggaggatgaccagctcctgctttcggaggttcagagggccctggacaaccatgagtttatcttttacgcccagccacagtgcaatatgctgacaggaaagattatcggactggaatccctggtcagatggaagcatcccgtcaggggcgtggtgcagccgggggaatttattcctttgctggagcggaatggctttatcaccaatttagacttatacgtgtgggatatggtgtgcgcccggctccatgactggattgccgcagggcacaagccggtgccgatcgcagtcaatgtctccagaatcgatatttattccatgaatgttacgaatacctttgtggaactgacgggccggtacgggatcgccccggcgcttctggctatcgagatcacggaaagcgcctatgcggaagattataatctcatccgccaggtggtgatcgatttgagaaaagcgggatttaccgtatttatggacgactttggaagcgggtattcctcactcaacatgctgaaggatgtgaatgtggatgtcattaagatcgataccaagtttctggatatgaacgagcacagccagaaccgcggtatgggaatcctggagaccattgtccgcatggcaaggctgacgcagcttcgcgtgatcgcggagggagtggagaaaaaggagcatgtggatttcctgagaaatgtaggctgtatctacggccagggctattactattaccgcccgatgccgatcgaacagtttgaaccgctgcttctggatgaagagaatgtggattaccgtgggattttggcgcatcagctggaagaactccggctggaggatctggtcaataaagatgtgaccagtgatgcgatcctcaataatatgctgggagggatggccctttacgatgtctgcggagataagatcgagctgcttcaagtgaacgagggatattaccgggtgaccggctgcaatcctgtcgatctggaggagcgcaggaaatcgattttggctcagatccatgaggaggaccgcgataaggtgtttgaccttttcgagacggcgtataaaaatcctttaaagggggcagacggtaccatacggcgttacaggctgaacggagaactgatgtggatctccctgcggatctttttcttaaaggagagagatgagcacaggctgttttatggatctgtcagtgatgtgacagaggggaagcgccgggaggaaaagctgattgcatcccggaaaattctcgcggatgtgttaaatatcaatggagaggaagcggaatttggacttgacgagatcatggctctgagccgtgaggtgaaggaatgcagaaaacgtctgggagagctggagcggtgcagactggcggagacggatcctctgactggtctccataacgggaagacggcagttcctctgatgaaggaatggattgccaggcgcagaggacagccgtccgccctggtactgttccggtttgacggtttcaaagcagtgaatgaggaactgggccagataaacggagaacggattctggtgaacagcgtggagaagctgaagcgctttttccgggaggaagatatcgtctgccggatcggcggatatgaaatcctggttctctgcaagaatatcggggagagtgacatgcgcaggaagctggaacagctgatggcggacatgaaactggaactggcccttgagtccgccgggatgcggccgtccatcaacgcgggttacgtgatgaccgcaggcggaggtacagattttgatgacctttacgaaaaggccagacaggcgttaaaaatggcgtctgcccggggaaaaggcatctgcatgcgctgtgggcaggaaattacggattagcctgatggcagacggggagccggggcgctgccaggtgtggaaagacgcctgcggctgccccggctcttcattttttttatagaccttgggttacgggtatggtatactaggaacacttggtaaggcaattcacaaaccttaccggcaattacataaaaagtgagggaatgaggatatgatagctgagaagatgaggccccttgttgaaaataattctgctattcgggccatgtttgaagaaggaaaacgactggcggccatctatggaccggagaatgtctatgatttcagccttggcaatcccaatgtgccggcaccggaggcagtgaaccgggcgattacggatattgtggcggaagaagcctccaccatggttcatggatacatgagcaatgcaggcttcgaggatgtccgggatacagtggcacagtcgctgaaccggagattcggcacgcattttcatctggagaatattctgatgaccgtgggcgccgccagcgggatgaacgttattttaaagacgattctggatccgggagatgaggtgatcgtatttgccccctattttatggagtacggtgcctatgtgagaaattacgatggagtgctggtgaccgtgtctccggatatctcctcattccagcccaacatagaggagttcaaagagaaaataaccggcaggacgaaggcggtgatcatcaatacgcccaacaaccctacgggggtggtctattcggcaaagacgctggagcggattggcgctgtcatgagggaaaaggaggcggagtatggaacttccatcgtgctgctgtcagatgagccctaccgggaactggcctatgacggtgtggaggtgccttatgtgacgccgttttaccataataccgttgtctgctactcttacagcaagtccctgtcactaccgggggaacggattggatacctggtcattccggatgaactggaggattcgaaggcggttattgccgcagcgtccatcgcaaaccgtgtcctcggctgtgtaaacgctccctcgctgatgcagcgggtcatcatgcgctgtatcgatgagaaggtaaatgtggaagcctatgacaggaaccggaatcttctgtacaacggactgcgcggttttggctttgagtgcatccggccggagggcgccttctatttattcgtaaaatcgccggaggcggacgacagggctttcagtgaagcgtgcaaaaagcatcgtctcctagttgtgccaggaacctcctttggctgtcccggttatgtgagaatttcctattgtgtgtcttatgagcagattgagcggtctctgccggcttttcaggcagttgccggagagtacgggcttgcacagcaggagggtgaacgatgaaaccatggaaggcaaatatcagaaaagtaattccttatgtgccgggagaccagccgaagggcagccatttaattaagctgaataccaacgagaacccctatccgccgtctcctttcgtgagcggggcgctgaaggagatggattacgatctgttcagaaaatatccggatcccgcagcttcggttcttgtggatgcacttgcggaatattataatgtagacagtgatgagatctttgtaggggtaggctccgacgatgtgattgcgatggcgtttatgacattttttaattcttcaaagccggtgctttttccggatatctcctactccttctatccggtgtgggcggagcttttcggcgtgccctgtgagaagccggcgctgaataaggagtttcagattgtaaaagaagactattaccgtgagaacggcgggattatttttccgaatcccaatgcgcctaccgggctctatatgccgctttccgaggtggaggacatcatttcccataatcaggagtccgtagtgatcgtggacgaggcctacatcgattttggcggaaaaagtgcgcttcccctcaccaggaagtatgaaaatctgctggtggtgcagactttcagtaagtcgagatccatggccggcatgagaatcggctttgccatcggaaatccggacttaatccgtgccttaaatgacgtgaaatactcttacaattcctataccatgaatatgccgtcccagatcctgggggcaaaggctgtggaagaccaggcgtattttaaagagacgacggagaagattatccgtacgagagaacaggcaaaggtaaggcttcgtgagcttggcttcacatttcctgactccatggcgaattttatctttgcttcccacaaaacggccatggcgaaggatatctatgaggcgctcagggcgaatcacatctttgtcaggtattttaaccagccggggattgatgattatctgcgcattaccatcggtacggatgaggagatggaggcgctgtatcgatttttggaggaatatctttagagctgcgttaccgcgggcagcggggcatttggcttatcatggttccggccggggtgtatagtaaggacaggtgatgaatatgaatcattggaagaagtactgcaggttaattctgaatattgttatccccctgcttgttatctggctggtctgttttataggaccgcgtttattaaaatttttcctgccgtttgtgatcggctggattattgcgatgattgccaatccgcttgtaaagtttctggaaaagcgagtgaagattgtgagaaagcacagctccatgatgattgtggtggctgttctggcgcttattatcacgcttctttactttgtcatatcaaagctggtatcggagaccgtcggttttgtaggggatataccaaagtattatgaatcggcctccatagaggttcagaaaatgctgctttccgtggaacggcttctgcagttcctgccacagggcgtttcggattctgtaaaccagttcttcggacatatcggagagtatttgaatctggcagtgcagaagatcgcaagccctacggtaacggttgccggcaatgtggtaaagagcattcccgcggcgctggtgtataccatcgtcacgatcttctcgtcttacttattcattgtgaaccgggataagatactggacttttttaagaaatatatgccggagggcggatctaagtattataaatacctgagaaaagatgtcaggcatctggttggcggttactttcttgcacagtttaagattatgtttgtagtagcagtcgtgcttgccgccggttttctggtactaagggtcgattacgcccttctgattgccgttatcgtggctttcctggacttccttccggtgctgggaaccgggacgatcctggttccctgggcggtgatccggctcttttccggagatacctactttgctctggggatgcttgcgctctacgttctgacacaggtactgagacgtgtgatagaaccaaagatcgtgggagacaccatgggactggatccgctggcgacgctgctgtttctgtatctgggatttaagtttaacggaatcgcaggtatggtgctggctgtccccatcggcatgctgtttttgaatctgtatgagttcggggcttttgattccctgatcagcagtgtgaagacgctggttcacgatatcaatgcattccggcggggaccggactgacgggaaggacagcgtaataccataatgaaaagataaaagaaaggaacgaacaggaggaaagaatgagaagcaggaacagaaaaaaaggaattcgtatggcagcggggctgatggccgtcatgatgatggcagccgtgccgttccctgccgctgcggcagagccgtgggaaaaggagaacggccagtatgtggatgcatccggaacacccatagcgggtgctctggaaaaaggcattacggtgacgaagtaccagaaccgggcgaatgcggacaagggaggcatcgactgggcaaaggtcgcggccgacggcgtggatttcgccatgataagaatcggatattacaaagatatggatccctactattccatgaatatgcagggcgcatctgcaaacgggatcaagaccggcgtatttttttatacgcaggcgcttgacacgcagagtgccgtagacgaggcgaattacgtcctgaagatggtgcgggactatccggtgtcgtacccaatcgcgtatgacgtggaatcacagcacctgttggacaacgggctgacaaagcagcagatcacagataatatcaatgcgttctgcaaagtcatatctgatgcgggataccgtcctgttgtctatgcaaacaatgaatggctgaccaatcacatggacatcagccagattccgtacgatatctggtatgcgaggtacggaaccatcaacaactgccagaacagaaccatatggcagtgtaccgataaaggaaaggtagatggaatcacaggcgacgtgacgatcgaattctcctttgtggattacgcagcgctgattccgccggaaggctggaaacacgtggatggaaactggtattatacaaagaattacgtgaaacagaccggctgggtacaggttggagagaagtggtactacttggattccaacggtgccatgattcatgatacgaccatgaccattgacggggcgtcttatacctttggccccgatggcgcgatggcggaataagagaaagaaaatagggatacaggatggattacagaaggtgaaggcagagaataatttagattcagatgatatgagaggactggtatggaggcttgcatttccctccatgctggcccagtttgtgagtgtgttttacagtattgtggatagaatgtacatcggtaatatcgccggaaccggcgaaatcgcattggcaggagtaggaatctgcggcccgattgtgaccctgatttcttctgttgcttttttagtgggtgtcggcggatcccctctcatgagcatacggcttggagagaaaaatgaacgggcagccaggcagattctggcaaactgttttctgcttctgaccgtgctgtcagtggtgattacagtgatttccctgctggtgaaaaaccatttgatcatgtggttcggagccagtgaggcgacgtttccttatgcgaacgcgtacataacgatttatctgctgggaacggtatttgcgcttctggcgacggggatgaaccagttcatcatctgtcagggctttgcaaaggtggggatgaaatcggtcttaatcggtgcggtgtgcaatatcatactggatccggtgtttatctttggctgtcacatgggggtgcgcggcgcggctgtggccacggtgctttcccagatggcttcctgcgcctatgtgcttcggttcctcttcagcaggcgggcgccggtgcggatcaccttcggtgagtacgactggcagattatgaagcgggtccttctcatcgggttaagcccatttctgatcattgcatttgacaacatcctgatcattgcgctgaatacggtgattcagaagtacggcggagcggagcagggagatatgctgctgacctgcatgaccattgttcagagctttatgctgatggttaccatgccgcttggcgggattaccagcgggacacagaccatcctgggctataattacggtgcgagaaggccggaacgaatcaagaaggcggaggttcatatcgcggcgctgggcctggtatttaccacagtgatgttcctgatcgcccacaccattccgcagttcttcgtcaggatctttacgcagaatgaaacgtatgtggagctgaccgtctgggccatcaaaatctacacgttaggcataattccgctggctgcacaatatactgtagtggacgggtttaccggtatggggatcgcgcgggtggcgatcacactgtccatgttccggaagatgatcttcctcggcggcgcatttctgattcctgcaaccatgggaatcaaatatatcttttatacggaacctgtttccgattttatcagcgcagccgtatcggtggtgatctacttccttgtcatcgacaggattatcaaccggaagccggtatttggacggcggaacatgccataaacagagtccggacaggaggaacaatgcagtgatgcgaaaatggattgccgcagccgcagtacttttattcagtaccatgggtacgggagaggccttcgcagagacgtggcagtatcaggccgcagaacagccggggcccggtacgaacgggggcgccatggcggaagagccgggcagtgtcccggaagcaggaagctggaatggactgacattcaccagttccaggctgggctatcaggtgacggttccggaaggcttcatgccgctggaatcttatatggacttatccgtggacgacaccatgaccctggacttatccgtggctgcaccggatatgacggtttccatggtggtggtcacgtatgacaagatggatgaggaatttaaggggatggatgccggtcagctggctgcagtgatgggacagggactgggcggatacgacgactacatgcagatcggagaggtggagatggtgccccttggagaccgggaatatgcaaaactgccggtaatctatacggggcttctcaatcaggacctgtatttctgctggtcaggcgagtccgttatgatgatcgagatcgtctacgatccgtaccggaaggccatggcagatgagatcatgggatcgattcggtaaaacagaattgaaagcagaaatggtatgtcggcagattgtaattgacatatgtcaaaaattgccttataataaatgacatatgtcagtaacatctgcaaaagccactggactaagccggaaaagacctcatgacaggtgttcataatgaaggaggagacgatatggcacggcccgtaaaggcgagacgaatatgtggaataccgggaaggatgcagtttggaccgctggaagcggggacaggcccggaggcggaccaattcatttccctgacgctggaagagtatgagacgattcggattatcgattatctggaccgtacccaggaggaatgcgccgaacagatgggcgtggccaggaccacggtgcaggctgtgtatcagtccgcgcggaagaagatggccgccatgctggtggagggaagcgctctttcaatcggaggcggaaactatgaggtatgtcccagggcaggaggctgctgcaaaaaagactgcagaaaacgtctctgccccggccgcaggtgtgacgggcaggaatatcagaatggaggatggaatcatgaaaattgcggtaacgtatgagaacggcagtgtgttccagcatttcggacacagtgaacagtttaagatttatcaggcagaagaaggaacagtcgtatcctcggaggtcgtgggaaccaatggaaatggtcacggcgcgctggccggattcttaaaagaaatgggagtggagactctgatctgcggaggaatcggcggaggtgcgagaaatgcactggacgaggcaggaatccaattgtacccgggggtgagcggggatgcagacaaggctgtggaggcactcttaaaggggacgctctcctatgatccggacaccatgtgcagccaccaccatgaaggcgaagggcacgactgccatcatggcggtggaagctgccatcactagacgttttacgtactgcacgctggattaaacagggctgtcttcccgccgtttcgcgggaatctttatggtgacttccgttccggttccgtgtgaactctgaaaggtaagaccgtaggactctccgtagagacgctttagacggaggttggtgttatagacaccgatgtgtacagaatcggaggttccattcgacatgggatctccgttttcttctgccagtatggactccagcgattcaggggaaattccgatgccgtcatcggagatgagaaagataatgtcctcaccctgacgccagcctgtcagaagaatgttgcctcttttttcttccgtccccatgattccgtggagccatgcgttctccacgatgggctggaaggtcagctttgggatggtgtattcggacagttcatccggcacatccacgacgaagctgacgcagttgtcataacgcatattctgaagttccacatacaattctgtgtgctccagctcttcctcaatcgtgttcatgagcccccgtttactgagcgtcagcttatagaagcgggagagcgtctgaatcgccctggtaacatcttctttccgtccggttctggacagccagttaatcatatccagtgtattatagagaaaatgcggattaatctgcgcctgaagagcgcggaactccgccagccgtaaatcttcagaggccttttcccggctgttcatcagatcgttgatctcctctgtcatataattgtaggtatcggtaagaacaccgatttcgtcacagccggtctcaacggtgtccatcggcatgggacggcccgtacgaacggactccatctgataggcaaccgcgatgatccggtcggcgatggagacagagagcttcagggcgatcgaaagagccaacgcagtgaagaggaggtaggccacaatcagctggatcatcagacgcgttccggcgtcagtgatgtggctggagggcagcagggaaatcatataccagtccgtgttcctgaccgggaaataagccgtgtaagcggcgccatccgggtacgataccagggtgaaggtcttttccggcccgatcctggacagaaactcgtctgtgggaatgtagtatatcccggccagggccatatcggaagcggataccatcacatcccggctgttgatgatgtaggcggcttctcccttgaccgaggcattgttaatcagtgcggaatcgaagggctcgctgttaaagtacacagccagataagcggaagcccgcaaattttcctgctcggagccggcaggaggcagataggtgattctggaaatgtaggccaggcggccgaatttctctgcttcagacggacttaaatagagttccggacagagcagatccttattctgcatggtgctgcagattccgtaccagtagctgctgctgaccgtggagaccggggcaaacagccggtttttctccgtgttgtacttcatcagatcgggatagacggaatcatcatagtagatgcggattcccgtaatcatggtgttgtcggtcaggctgtctgtcagatgaaacaggctgtccatccggttctgctccggttcaaacgctgcggcgtcgctctccgagagatagaagaggcggtggatcgaggacgaatccctcagtgcgtcggaaacataggtcacgtgagacaccagattttcaatcgacgccgcggtctgcgcagacagagcctgctcggaacggatggagtcgtccatgacgatgccgtatagcctgacgaaaataaagcctgataacacggccgtgggaaacaggattaaaagggcatgggagatgacaagcttattcttcagcttcaggtcatacgtatagtggcgcaggattcggttgacaaagtttttcatgagagcattttctccctgtattcagaaggggacaggcccacaagcttccgaaaggtcttactgtaatagttgccgtcactgtagcccaccttggaggaaatatcggcgatcttataacggggatcgcctaaaaactgtttggacttcttgatccggtagtcggtcaggtactggtttaacgtctgtcccgtctcatttttaaacagcgtgcagatgtagctggaggagcggttcacgtattcgctgacatccagtacggagagcgaggagatggcgtagttctggtgaaggtattccttaatctgaaagaccagaggattctcccctgtattccgggtcaggtgatcaaaatactgttcgattttttccagcagcaggctgtgcagctcggaaaaggtgctgcagcggagtacgctgtcccagatcgactggggattgacgccctcgttattccacagagagacgtagttcatgatgccgttttcatccagctttaccaggtatttgtaatagatatccttgacctggctgggcagaagcggctgtccgtttaagatggaatcgcggagctgcccggcaagttccagggccttatccttctgctttccggagagcgccagatcaaagtccatcagcacatcggcgggaggacagagggcggccggtttatcgtattcagtcagaatggagttaaagtcatgaaagaagctgttttccaggaggagcttcgccttctcgtaggagaggtggacggaagcggtccccgtgacgatgggaccgaccgccaggaaaaaacggcagtatttgtcaaagctctgctgtaaaaacagggcgcagcgttttaccgcctccttatccggctttttttcggaataaatatgtacgattacatagcggtcagagcgaaaggcatagacctgttttaatcccagctccgttaacaggattaaaaaattctcccgcgcctcatccatcggtatttcgggaagctcggagagcggcgtcacactgtccacgatgatcgaaaaaaataaggtggacggacccatggccaggcccagatgcctgctcagctccagagcggccgtctcgctgtcgggaagcgtcaaaaggtgagctaaatggcccttctgttccttttcctgaatcatcacggcactgcgcgtatgacttcgtacctgacagtttaacagggcttcggccagggcgtcatcgagctcggagaggctcagtggtttctctacgtaacgaaccgccttcagcttaatggccgcttttaaatactctttatctgaataggcgctcatgaaaataatggcggtatcaggattttgttccaatatggcttctgccatctcaacaccggtcatccggggcattctgacgtcagttaagacaatatccggccgctcggagaccgcagtctccagaccgtgtaccccgtcgtcggcgagaagtatggagtcaaaaggcagagaaagcctggcgatgctgtcacggattccttcgcgggtcagtttttcgtcatctacaatcagcagtttcatcgtatctttctccttccctaagctggaacatcacattgttcccagtttcatgttccacaaatatggtatatcaatattgtaacaggaaatgggaaatatgcaacgaaaatagacaaattaccccatgggtagtatactggaatatattggaaacgaaagagaaacggcggaggaaaaacggtgaaacggttctggctgatcgcaggaattttgactattttttgtattgcggcgtgcagtgcagcgggtatggtgacagagagcccggaatatgcagttatcatgaaatcgaaagataaccagtataatgaagaagtggcggaagctttccgccaggcggcggaggaagcgggatatcgctgcgaggtgctgtatccggagacggcgagagcccaggaccaggtaattctggtgcgccggatgatgcgggagagggtgaaagccatcgccattgcggtcagcgacgagcatgcgctcgctcccgtattaaaggaggcgatggccaaaggaattgtgatcacaactttagattctgatacggaaaaggacagccgcagcatttttgtgagcccggccgatccgaaggagacaggcgccggactggtgcaggcggtcagagactgcatggatggggagggccagtgggccattctttctgcccaggcccgatcagccaatcagagccagtggatacacgccatgatggaggaactggaaaagccggagtatcagaagatgcgtctcgtggatattgtatatggggaggatgattataagacgtccgcagccagaacgagagagctgattgaaaagtacccggcgctccgggcgatctgcgcgcctaccacggtgggaatccaggctgccgcggatgtggtgagggagcagggactcgagggacagatacgggtgacggggcttggcattccggccaagtctgaggacggaaccgtttctgacgataccggtgtctgtccggcgttaaatttctggaatccggcagctctgggaagactgtcagcccaggtatccatggcgctggtgaatcaggaacttacagtgagagaaggagaggtattcagaacggaagacggtggggagtatctgattcacaagggcgccggaggcggtctggaggtgacggccggtgatccgctcacaccggatgagagcggcagcggcctgtgaaacaggatgaaaaggcaaaaacgaaatattttccagtatttagaaaaatattaccgtagaaatgtcgattcctgtcgtgttatgatataaactgtcagaaaacaaaggggtgataaaaatgaagcatattttcgtaacgtttgaccaggcagaacagatcttttcatttgtaaaaattatgagcaaatgtgattttgatgcggacgtaaaactgggaagccgtatagtagatgcgaagtcgattgttggagtgctgtcccttgctaaatcgagaacagtagaagttatcttccatacagataactgtgataatataattgagcagatagcagctatcgttcccatcgctgcgtgaagaaaaaacagaatcaggcataagaagccatagcgttttaaggcagaggaagtaaaagtcagaaccttttacttcctctgcctttttccgttctcaaaagagcggattccttaagaccctgtggactgataatgggacagtccgaaacgccacagacaggccgccggaatgagaaagaggcaggcggggatcggaagaagggcgtaccagtctctgaccgtttttccggtcagatagagaaacggataatactgaaacagtgcaaacggcaccaggaaggtacagatcgtaagcaccgtctttccgtaaatggagaccgggtattttccgtattcccgtgcgccgtccgtgaatacgttcatgaactccaggccctccagggtgaagaagcagatggaggcgaagatgatatagatggaggcaaacacgagagtccccccaaggatcatgaggaaaagtgtgaacgcccgcatcggagtccagatgataccgctctttgtcactccgtaaaccagcatgacggcggcctggaggagccgtccgatccttgtcagttcgattttgctgcacagtaccaggaagatgcagctgcccggccgcagcaggattcggtcaaattctccgtttccaatcatctggttaaaggtatcgaaactgcggaaaaatgtttccgccagagtatacgccatcagagtgatggaaaaacacaggagtacctccgggtaggtgaatccctgaacctcatgaaaccgttccatcatgaaggtgacgcccagaaatacgttgaacgagacgagaaactgccccagtacggtgaaaaagaatgaggccttgtgctgcatcatgcttttcagctgtattacaaaaaaacgaaaataaagccgtattgctctcatatgatagtcctccttccattaaccgccctgtatgacaacgtgctgcaatgcgcggcgttccatggctctgccggcggccagcagtgtaagcagccagaaggcctgcagcaaaaggcttacgtacatctcccggcccgccaaatcgctgctgaagatgcgaaacggcacattctgtacggaggcgaagggcagcaggctgacgaccgcccttacagttcccggcagaaaggggagaggaatgaccgcgccgctgagaaaatcgaagagcgacgagacgatcagacggattccctgagaggaaatggtatagaaaacggacagatagaccaccatgttaagcgcagtgataacaagcagcgccagaatcatggagagtatggtaaaaaaccaggttcccgcatcggagggaagcgtgaggccgtagggctttggaagaagaagggctgcggccaggatcggcatacagcgcagcaccgcctttgacagccggacggccagactccggacgtaccacatgtcatagaggcgtatcgggcggcagagctcatagaccacattgcccgtggtgatggaatcgaacagctccatttcccagaaccaggccatgtagagggccagaaatgcctgctgaagccagacgtaggacgacagcgcctgaaaggtcatgggaaatgacgaggcgtccgcctgatagaaggcccggaacaataaaatctccatggaaccccagacaaactgggtaaccatgccggatactgcggcggtccggtactgcagcccatggataaagcgaagacggaaaaaggaaagatattttttcatgggcgcctcctaaatccggtaattgcggtataagtccgcaactatttcatcaagagtcccgccttcctgcatgcactgggttttcagtgaccgggaggagctgtccaaaagcagacggcctcttccgatcagcatgacacggtcagtcatggcttcgatgtcctgcatgtcatgggtggttaaaaggacggtggtgccgtgaattctgttctgtcttcggataaagtcacggacagccagcttggagacggcatccagaccgatggtgggttcatccagaaataagattttcggacggtgcaggagggaggcggcgatttcacagcgcatccgctggccgagggacagctgcctggcaggcgtccgcatgacttcactcagggacagcagattcacaagttcgtcgagtgcatcttcgtattggggctggggaatttcgtagatatcgcggagaagttcgaaggaatcgatgacgggtacgtcccaccagagctgcgagcgctggccgaatacgacgccgatctcttttacgtgttcctttcgttccttccaggggacccggccgtcgatgaggcacgttccgctgtcgggagtcagtattccgcttaagattttgatggtggagctttttcctgcgccgttggggcctatgtagccgaccatctccccgtctcctatggtgaaggtgatgtcgtttaacgcatggacgtattccacttctctgtgaaaaagcgctctgaccgcttcggaaaagccggcgctccttcttgcgactttgtaagtcttgttcacatgttccacttgaatcataatggttcctcctggtagtaatattatggaacgtggacttcctgacagaggacagccggtgatagatctgtcgtaacagtgagtgcgttctaatatcttgccaagcggtggaatgccgtaaaaatgcattcctctccgggatttgtccgtttcgcagccagaaatgtctgcttcccggggactctaccgtggtatcaatattctcttttcccgattcccggaatgggatgactgcgggagaaaggaatttaattttagcaccggcaggaacaaaagtcaacctccgctcaaaccgtaagatcagggtcaaaaagtggaaaacaggtattgacttattcgtaaaaagtgataatataaacatatgaacagttattcatatgatggcataaagtaagagtatgaagacactgatgcagccagttaaccagacaaaaaggaggtaaatcatggaggacgaaaacagaatggatctgcaggacagcgaggcccctcactgtgattttatatcggtccacgaggacattgtgaaccgggtcatgcaggtgatgccggcggaccagcagctgctggatctggcagaattcttccgggtattcggggattccacccgaatcaggattctgtatgtactcagccagtccgagatgtgcgtgtgtgatatcgcaggtctcttaaagatggggcagtcagcgatttcccatcagctgcgggtcttgaagcagatgcgtctggtgaagttccgcagggacgggaaaaccgtattttattcccttgccgacggccatatcgagacgattctggcccagggcatggaacatatcagtgaataagagaagaggaaaaggagagaataaggtatgagaaagattattaaattagaaggtttatgctgtgccaactgtgcttcaaagatcgagacggaggtctccaagttagcaggcgtgaagtctgcggcactcagttttatgacacagagactgaccatagaagcagaggatgaccgtgcggacgcgatcgtggaggagagcagaaaaattgcatataagatagaaccggaagcagaattcaaggtactccggtaaataaaggagcagctatgacgaagaaacagaaaacgatggcggcaaggctgtcggtcagtgcagtatttctgattgcgggagccctgatggaagggcgtacggcttatgcctggatcccgtttgtgatttcttatctgtcggccggatatgatattccgcttaaggcagtgcgcaatattttccatggtcaggtatttgatgagaatttcctgatgacagtggcgacttttggagcaatcggctgcggagccctggaggaagcagttgcggttatgctgttttaccaggtcggtgaactgttcagtgattatgcggtcaacaaatccagaaagtccatcaccgagctgatggatatcaacccggagtatgcaaatctggtccgggatggaaaagaggagaaggtcgatccgtatgaagttgaaatcggagacacgatcatcataaaaccgggtgaaaaggtgccgctcgacggcgtgattgtaaaaggcagctccagtctcgatacaaaggctttaaccggagaatccatgccggtggaggtaaaggaacgcgatccgatcatcagcggctccatcaatttaaacgggctcctggaagtgcaggtgacgaagctgtttgatgactccacagtggcaaagattctggaactggtggaaaatgcaagctccagaaaggcaaaggccgagaattttatcacgaaatttgccagagtgtatactccggtggtggtctgtctggctttggttcttgccgttatccctcctcttcttacaggcggaaactggggaatctggatataccgtgcgtgcagcttcctggtagtttcctgcccgtgtgctctggttatctctgttccgctcagctttttcggaggcctgggcgcggcctccaggcagggaatcctgatgaaggggagcaactatctggaagccgtggcatcactcgacacggttgtgtttgacaaaacgggaacgctgactacagggaagttccaggtaacccgggtaaaaccggcggagggaacgaaggaccagctgctggaactggcagcctacggggaattccactccaatcatccgatcgccatatcggtgaaggaggcgtatggaaagcgcgtggaggaatccaggattgttacggcaaaagagattgccggacatgggattcatgccgtgctggagctggagaacggcagaaaagacttatatatcggtaacgaacggctgatgaaggcacagggaattaccataacagaggtgccggagattatgggaacctccctctatatcgcggaggacggtgttttcctcggctccatcatcatctctgatacggtgcgggaagatgttccggatgcactgcacggactcagaagagccggtgtgagacgcctgatcatgctgaccggagataagcccgaggtgggcagggcggttgcggataagctgagtctcgatgaagcatacggcggcctgctgccggcggataaggttttaaaggtggaagaactcctgactgccaagcctgaaggcagcacgctgggattcgtcggcgacgggatcaatgatgccccggttctcgccagggcggatatcggcattgccatgggaggaatcggttccgacgcggcagtggaggcggccgacgtggttattatgacagatgagccatcgagactcgtggacgccatcgtgattgccagaaagaccatgcggattgtgaaacagaatattatatttgcaatcggtgtgaaggtgctggtactgattcttacggcactgggctttgcgaccatgtgggcggcggtatttgccgatgtgggggtttcggtactggcgatcttgaatgccatccgggcgctgaattataagaaggcgcgggataaggcttttgaaggctgaacggttactttacttccagattatgaataaaaatacattgacaaacttttttcaagctgttatattttacacatataacgggggtgatgtgagagaatttcaccggggcgaacgctccggtcaggggttctggcacatcacgcccctttttcgtttcacaggaataagagaggaaagggagacgccattatgagcaaatacaggaaagaagatatcttccgaatcgtggaagaggaggacgtggagtttatccggcttcagtttactgacatttttggaatgctgaaaaatgttgccattacatcgagccagctgaaaaaggcgctcgataaccgctgtatgtttgacgggtcctccatcgagggctttgtgcggattgaggaatctgacatgtatttatatccggatctggatacctttgagatattcccgtggcggccgcagcagggaaaggtggcgcggctgatgtgcgatgtctaccgtcctgacaagactccgtttgagggggatccgcggtatgtattaagacgggtgctgaaggaagcgtctgatatgggctttgtcttcaacgccgggccggagtgtgaattcttcattttccagaccgacgaggaaggacggccgacgacagagacccacgaaatagccggctacttcgatgtggctccgatcgatcagggagagaatgtgcgccgggatatcgtgctcaacctggaggatatgggctttatgatagaggcctcccaccacgagatggcgccggggcagcatgagatagacttcgagtacgcggaagggctggtgacggccgacaatgtcatgacgtttaagatggcggtaaaagccatagcgaagcgtcacggccttcacgccacgtttatgccgaagccgaaggccggagtcaatggatcggggatgcatctgaatatgtccctgtccggtttaaacggcaaaaatctgtttgaggatgagacggaccagctggggctcagccggattgcctatcagtttatggccggaattttaagccatatgaaggaaatgaccattttaacgaatccgcttgtgaattcctacaaacggcttgtgccgggatatgacgcgcctgtctatatcgcgtggtctgccaaagcaaaccgcagtcccctgatccgaattccgtcttcaagaggagagagcacccgaatcgagcttcgctgcccggatccttccgtcaatccttatctggcgctggcggcctgcctggcagccggactggacggaatcaaaaagggaatggtaccgccggacagtgtggatactaatatttataccatggcgccggaggaggtccgtgcgcgcgggatttccagacttcccgagacactgggggaggccatcgaggaatttaagagcagtgagtttatgaaagaggttctgggagagcatatttataccaaatacctggaagccaaggaggccgaatggcgtatgttccgggcgtacgtaacggattgggagacaaaggagtacttatataagtattgaccgttttgtttcgcagctgattcgataccctggaggtgagtgcgcttggccaatgtgattgtggcgttttccaaaccggaggacgcgaaaaatattagaaatattcttgcgaaaaatggctttgccgtcgcggcggtctgtacttccggcgcacaggccattaactgcgccgatgaactggggagcgggattctggtctgcggaggcagatttgcggatatggtgtacgatgaactccatgactgcctgccgcccggggtccggatgctcttagtcgcatctccgggactctggaacggaagggctccggaggatgtggtctgtctcggactccccttaaaggtgcacgatctggtcagtactctggaaatgatgatggaatcgctggtcaggaggagaaaaaaacagagagtgaagcccctggagcggagcagggaggagcaggaattaatcaaacaggcgaaggagcttctgatggacagaaaccatatgacggaggcggatgcccaccgctatctgcagaaatgcagtatggacagcggaaccaacatggtggagaccgcgcagatgattatgagcctgattaacagataagggggataccatgaagtttacaaagatgcagggaaccggaaatgactacgtttatatcaattgttttgaggagacggtggagcggccggaggaactggcggtgaaagtcagcgaccgccattttggaatcggttcggatggcctgattctgatctgtccttccgggcaggcggactgccgcatgaagatgtttaacgccgacggctctgagagtgagatgtgcggaaatggaatccgctgtgtggggaaattcgtgtatgaccaccatatcgtggaaaagaaagaattcgatgtggagacgaaggcgggaatcaagcacttaaaggtcacggacgagggcggaaaagcagcgcttatcacggtggacatgggaattccggaggtgacgggagatgtgccggagccgatcgtggtcgacggccggtcctatgagtttattggaatatccatggggaatccccatgccatttattatatggatgagattgacgacctggatctggaagcgatagggccggcgtttgagacacatgaacgttttccggagcggaccaattccgagtttatccaggtggtcgacagaagtcatctccgcatgcgcgtgtgggagcgcggaagcggagagacgtgggcctgcggcacgggagcaacggcaagcgcggtggcctccgtcttaagcggcaggacggagaataccgtggaggtggagctaaaggggggaaccttacagattacctgggaccgggagagcggccatgtgtatatgacaggaccggccgtggaagtatttcagggggagtttcagccagaaaatctataatacgcttacaggaggacatcaatggtaaaagtaaatgacaactatttaaaactgccgggaagctatctgttttcggccatcgcaaaaaaggtgaatgcctatactgccgcaaatccggataagaagatcatccgtcttggaatcggcgacgtcacgcagcccatcgcgccggctctcataaaggcgcttcatgatgccgtggatgagatgggaaacgcggaaacctttcatggctatgcgccggatctgggctatggctttttgcgggaggccattgcggcaggcgattacgcgtcacgcggctgtgagatcgatgcggatgaaatcttcgtttccgacggtgcgaaatgcgactgcggcaatatccaggaaatcttcagcgaggatgcggtaattgccgtgtgtgatccggtctatccggtttatgtggactccaatgttatggccggaaggacaggggagtatgatgagaagaccgggaaatggagcagagtcatttacatgccgtgtacggcaaagaaccagttcgttccggagctgccaaaggagactcccgacctgatctacttatgtgttccgtgcaatcccaccggaaccacgcttacgagagaccagcttaaggtgtgggtcgactatgccaacagaacaggcgctgtgatcctttacgacgcggcttatgaggcatatatcgcggaggacacggtcccgcactccatcttcgaaatcccgggggccagaacgtgtgccatagagttccgctccttctcgaaaaatgcaggctttaccggtgtgcggctgggatttaccgtgattccgaaggatctggtccgcggaggcgttacacttcattctctgtgggcgaggcgccacggaacgaagtttaacggcgctccttatatcgttcagaaggccggtgaggccgtatactctccggaaggaagagcacagttaaaggagcaggtggcctattatatgagaaatgcgaaggtgatttatgacgggctgaaggaggccggatgcgaggtatacggcggtgtcaacgccccttatatctggctcgtggtacccgatggaatgacgtcctgggagttcttcgactgccttttaaatgaagccggcgtagtgggaactcctggaagcggatttggccccagcggcgagggatacttccgtttaacggccttcggcacatatgagaacacggtggaagccgtggaacgcatcaaaaatatgccttctttaagaaaataacgttgacaaccggtctgtaagtgggtatgataggtgtgaaaaaagaaaataaagaatatggttatcaataaaaaggacaaaagcgttcgtaccctggtggtgctgacgctttttttaatattacaggaaagtgctcccgtggtattaaaaagccctccggacaggattaccctgcggcggacggaaatcatgtcgcgaaagcggcccgccgcaggcggagaatccattttgcgggatttcttcgtaacgtgtgtcctgtcgtaatttgcctgaaaagaaggagagaacaacaaaatggacgagatcgataagaaaatattgcagatgctgcaggaaaatgcaaggtattctcttaaaaagattgcagagaatacatacctgtcttcaccggcggtttcttccagaatcggcaggctggagcgggaagacatcattaccggataccatgcggcggtggatccggtcaagctgggataccacatcattgcatttgtgaatctggacgttctgccgggagaaaagcccggattctatgcccggatggcggagattcccaatgtgctggaatgcaattgtgtgacaggagactattccatgctgttaaaggtggcctttcagagcactatggagctggacgtttttatcggtgaagtgcagaagtacgggaagacaaacacgcagatcgtattttcgacgccggtcggtccgaggggagcggacgtcatgacggccgggatatgaagaacctgcgggaatcgatcaaaagtggtacattcagggctcttttcacatactttataatatagaggtatgtgaaaggagtttttcttttggctgaaagaaagatagtagtgatagatgccggtcacggcggcgctgatcccggcgcaaaatttgaagggagacaggaaaaggacgacgccctgaggctggcgctggcggtaggaaacatcctgtcgcagaatggggtagatgtaagatatacaagaaccgacgatacgtataatacgcctttggaaaaagccacgatggcgaatgaggcgggagcggactatttcgtatcaattcaccgcaatgcaatgccgataccgggcagcgcctccggagtcatgagcctcgtgtttgaaaataagggagttccggcccagcttgcaaacaatatcaatgaggaactggccaatacggggtttgccaacctgggcatcatcgagaggccggggctggtggtgcttcggagaaccgaaatgccggctgttctggtagaggtgggatttatcgacaatgaagccgacaatcagctctttgatgacaatttacacgccattgcagaggccattgccaacggcattctgacaacgattcgggaaggtgaggcggagcagccggagtactatcagattcagacgggagcttaccgcatccgttcactggcagaacagcagcaaaatacgctgcggtcccagggatttcctgcctttatcgtcagtgaagacggtttattcaaggtacgggctggcgccttccgggaactggataacgctgtacgcatggagcaggaactgagacggtatggatacaatacatttctcgtcagaagaccggctgtttcttaagagaccggaccgggaccgtattcctgcagagaatatggtcccggctgggaatccgggaccgggggaatagcagccgtgatgacacggcggtatctcgcatattccgggaaaatagtgtccgcggccgtaaatgtgtggtataatagagatagaaaaacaacaaatcaacggtcacgcatgcacaggagggattcacatgggagataagaaacttattattaccattggccgtcagtatggcagcggcggcaatgaaatcggtcggaagttggcggaggaactgggaattgatttttacgacaagaatattctgcgtatgaattccgacgagagcggtatcaaggagagttactttcacctggcggatgagaaagcggggagccggcttctgtaccggatcgtcagcggcatgacgccggagatgagagagccaagcttcggatctgatctgatctcggcggataatctgttccggtttcagtcggaggtgatccggaagctggcagaggagcagtcctgtgtcattgtgggacggtgtgcagattacgtgctggaggatgcggatgatatcgaactggttcgggtcttcatttacgcagacatggatgcgagaatcagaagagtgagggagaaggaactgtatacgcccgaggacgtcaggaaaaacgtgaagcggattgataaggaacgccggaattattaccgttattatacggggagaggctgggcagacccggaaaactacgatctgctgatcaatacgtcgacgacggggattaagggaagcgtcagaatgattgaggagtacataaagatcagaggctataaaatttaagcacaggcggcacagtcagatgggactgtgccgcctgctgttgtgcacggctcccgccgcttttatatgacggaaaatgatctattgtgaaaacctgggggagtgtgatatgatagagccatccgggctggcagaagaacgaaaagggtccgggaatggaaggatcggaaaacacgggaaaataccgggaatacaggaagagggacaggagagaggaaacacatggttaaggcagtgatttttgatatggatggcgtaatcatcgacagtgagggaaaatatctggaatttcagctggaatttgcgcagaagaaaaacccgaacgtgcgcatcgagcagctctatccaatggttggcgcgacgaaaaaagaggcgtgggaggtactggagcatgcggtcgataatggacagacgtgggaggaacttagagatgagtgccgcaggcgcgatatttacagtgaagtggactacagagagatctaccggccggaggttacggaggttttaaaaactttgaaggaaaaggggtaccgccttgcactggcttcctccacccagctggacttggtggaacgggtccttcgtgaaaatgagatccgggaatattttgaggtggtggtcagcggcagccagtttaagcggagcaaaccgaaccctgaaatctaccagtatacagcatcccggctgggcgtaaggacggaagagtgtctggcagtggaggactccaccatcgggattacagcggccagcagagccgggatgaagatcgcggcggtgatcgataaccgctacaatttcgaccagagtctggcagattatcatattgccagagtgaaagaggtattagaagtggtgaaggaagcataaaatacgatatacaaccttgacggcagccgtattctgggaagctgccgggcgtggattaatacaaggaggaatcatttggagtatatcggtgaattgctgaaaggcgtggtcataggaattgccaacatccttcccggtatcagcggagggatgctggccatatccatgggcgtgtacgacacgatcatccatgcggtgaaccggctttttaaggagccggtggagagcataagaacgctgtttccctacggtctgggggccgtggctggcatcatcagcctgtccctggtattcgaatacttattcgggacgttccctttgcagacgaagctggcgtttatcggactcatcggaggcggccttccggctctgtttgagaagacgaaggagccgggggagaggaggcgcggcgtgatgacgatctgcgttacagccgctgtggtgatctttatcaccgtggcaggcggaatgtccatcgcctcaggctcccatggcggtgctgggacggttaagaccggagcagagtatctctcctccggccggttctggattatctccatgttcctggtaggcatactggctgcgggaaccatggtggtaccgggagtgagcggatccatgattatgatgatgatcggagtgtacgaaccgctgctgcagacgacgaacggctgtatcagggctgcggccgcgtttgattttccggcgcttttatccgacggactggttctgctcccttattttacagggctgggcctcggaatctttctgtttgcgaaaatcgtggaacatttgctagtcaatcacgagcgccagatgtactgcgtcatcatcggtctggtattttcttcgccggtggtgattctgtgggatgtggcctggagccggatcgaactctatcagctgctgggagggatctccctgtgtctgctgggatatgtggcggcagtccgatgcggcggagaagggtgagcggagaacagatcactcatagcaataggaaacaaaaaactgatgcattcgttctgccgggcagatgatgcatcagtttttcgttttactatgggtgcgttcccatagaatccgattatggatttaactcagcgattcttgtgattcccacataaatatgggaaatcttataccaggtgcggaaatcgatgactcccgtcaccggaaggccgaagatggactggaattcccgtacggctgccgctgttgccggtccgtagattccatccggtgtgatatgcgggatagcgctgtacacagtggcaatggcgtccagctgttcctgcacctgctgtaccttctggccgctggaaccgatggttaaatcgtagccgggccaggaagcgggaattccggaaatctgttctgccgtgttgatatacatgtcgtccccgtagaaatagcgcagaatttcaatggggctgtatccgcgctcacccagatcggcggagccccactgggtcatccagcccttgtgctgacaggatacgcggttgccgtcacagtactgggtcagaatcggctgtttgacctcgggacgcgataagtagttgtcgaagatttcatccacaacttcagagatggactggaagatgtttctgccgtaaatccatttatggtcataggctgtggaggaagtgatggtgaaatcgtagccctggttgcggtaccactccgtatagacgcggttcagcgtgaagctcataatggccagaacgtttgctgttatagaggagcggggccatgtggcgtagatttcactggaggctacattcttgatatagtcccggtatggaacgtagtaattgggggcggtagagtcggttgggactccgtcatgtaccacgacggtctgaggaaccaccacgcggcttaagacgatctcaccggtttcagccaccggctttacttcagcttcagcaattttaggaggatagtatccatagagcgtgtggtccggtatgacgatgggggtgtccggtgatgtctcgtcggccagtggtgtcatgcgtaccggctggatcgcgagagcgtccggcagaatttccgttccggagatggcgacttccgcaaagccctgcgcccggatggtgatggtatattcggaatagggctgggttaagccgggcgacaggctgtattccagcggaggagcggctaagcggatttccccggtctggccggaagaattggtgttcgtcgattctacagtactttcaggatctcctttgtaggcgatggaaacttcggcatcgcggataggaaaattgttttcggcagaaactacgtttacctggagagagccggtatcagtaggttccagtgcggcagcggtcatatattttctcatagattgcccctttattggatgattactgacagtatatgacggctgtctcccaaatgttccggtttttcggaaaacgggctgcggcgtagaatttttctgctgagaggggggcaggcgccgcagaccgggaatcccggctgactgaagggattccgaatttccggccggtttaccggaacatggattctacgtagttacgcatttcattccggctttcaacgtttctggctccgtctgtgatctctttccgtctggattccggaagctgtgcaaagcgggtcagaatgtcggaatgctgtgccagttccatcgtaaagccgatgggcatttcactgttatctatcatgaacatcacctcgcaaatagtctctgcagatttacgccggattattcgccaggacggtttttccttcaggatgtaaaagccacggccggaagaaccatccatattcatggcgtaaagtggaaattgtataatatgtttaaaagaaagggtctgtcacgcgaaaagataggcagacaatcgtgaagaaaagagttgaaaaatgtcgtgaaatcatgtataatctattcaatttgggctgattttcagaatgcccggacaacccatagtatacagcataactcatagcattaagaaaggattgggactttacgtatgaaagcttttttaatactggaagacggaaccgtattcacagggaccagcattggttcgaagagggaagtgatcagcgaaatcgtatttaatacttccatgaccggttatttagaagtcctcaccgacccctcgtatgcagggcaggccgtggtgatgacgtacccgcttattggtaattacggaatctgccgtgacgatatggaatcgcggaaagcatggccggacggctacattgtcagagaattatctagaatccccagcaacttcagaagcggggataccattcagcatttcttagaggaacaagatattccaggtatcagtggtatcgatacgagagccctaacaaaaatcttaagagaaaaaggtaccatgaacggcatgattacaaccaatgaaaattttgattgtaatgaggctgttgcccgcatgaaaaaatattcagttaccggtgtggtgaagaaaaccacctgcgctgagaaatacgtacttccgggagatggaaagaaggtggcgcttctcgatttaggcgccaagatgaacatagcccgttctttaaatgaaagaggctgccaggtaaccgtatacccggccacgacggcggcggaagagattctggcaggcaatcccgacggaatcatgctttccaacggacctggagatcccaaggagtgtacggatattatcaccgaaatccgtaaattatatgaatcagatgttccgatttttgccatctgcctcggccatcagctgatggcgctggctacaggggcggatactcacaagttaaaatacggtcaccgcggcggaaaccatccggtcaaggatttagagactggacgcgtctacatctcgtcacagaaccacggctatgtggtggacatggatacgatcgatccggggacggccgttccggcgtttgtcaatgtcaacgacggcaccaatgagggcttaaaatacgtaaataaaaatattttcacagttcagtaccatccggaggcatgtccgggaccgctggactccggctacttatttgacagatttttaaacatgatggaggagggaaagtaatgccgaagaatcctgatattaaaaaagtacttgttctcggctccggcccgatcatcatcggccaggcggcagaattcgactatgcgggaacccaggcgtgccgttctttaaaagaggaaggcatcgaggttgttctcttaaactccaatccggcgaccattatgacggataaggatattgcagacagggtctacattgaaccgttgaccgtggaagtggtggaacagctgattctgaaagagaaaccggacagtgtgctcccgactctgggcggccaggcgggattaaaccttgccatggagttagaggacgccggattctttagggatcacaatgtgcgtctgatcggaaccacggctctcaccatcaaaaaggcggaagaccgtgagatgttcaaggagaccatggaaaagatcggtgagccggtagcaccctctgatatcgtggaggatgtaaaacacggtctggaaatcgcggcagagatcggttatccggtagttctccgtcctgcttatacactgggcggttccggcggcggtatcgctgagaatccggagcagtgcgcggagattctggaaaacggccttcgtttatcccgtgtgggccaggttctggtggaacgctgcatcgcgggctggaaggaaattgaatatgaagtaatgcgcgacggcgcgggaaatgtaatcaccgtctgcaacatggaaaatatcgatccggtgggcgttcataccggggacagcatcgtagtggctccctctcagactctgggtgacaaggaataccagatgctgcgtacctcagcgcttaaaatcatcagcgaactgggaatcaccggcggctgcaacgtacagtatgccctgaatccggacagctttgaatactgcgtcatcgaggtaaatccgcgtgtgagccgttcttccgcgctggcttccaaggctaccggctacccgatcgccaaggttgcggctaagattgcgctgggctataccctggacgagattaagaatgcggttacgaagaagacgtacgccagctttgagccgatgctggattactgcgtggtcaagatgccgcgccttccgtttgacaagtttatcagtgccaagagaacgctgggaacccagatgaaggcgaccggagaggtcatgagcatctgcacgaattttgaaggcggtttaatgaaggcgatccgctccttagagcagcatgttgacagcctgatgtcctatgattttacggggctttccgacgaggaattaaaagagacgctggccctcgtggatgacaggagaatctgggtgattgcggaggcgttaagacgcggcttcacttatgatacaatccatgcgatcacaaagatcgatgtctggtttatcgacaagctggcgatcatcgtggagatggaagctgcattaaagaagggaccgctcacagtggacctgctgagagaagccaagagaattgagttcccggacaatgtcatcgcgaggctgacaggaatttcggaacaggacattcaccagatgcgtaaggacaacggaatcgtggccgcatttaagatggtggatacgtgtgcggcggaatttgccgcggagacgccttactactattcctgctttggaagcgagaatgaggctgcgttcacgaatgaccgcaaaaaggtgcttgtcctcggttccggcccgattcgtatcggccagggaatcgaatttgacttctgctcggttcacagcacctgggcgttcagcagagaaggctatgagaccattatcgtaaataataatccggagacggtaagcaccgacttcgatattgcggataagctgtattttgaaccattgactccggaagacgtggagagtattgtggacattgagaagccggatggcgcggtggttcagttcggcggccagacggccatcaagctgacggaaagcctgatgaagatgggcgttccgattctcggtacggcggcggaggatgtggatgcggcggaggaccgggagctgttcgacaagattctggaggaatgcaggattccgagacccgcaggccatacggttttcacagctgaagaggcgaaggaagcggcccataagctgggatatccggtgttagtccgtccgtcctacgttctgggcggccagggcatgcagatcgctatcagtgaccaggatgtggatgaatttatcggaatcatcaaccagattgcgcaggagcatccgatactggttgataagtacatcatgggcaaggagatcgaggttgacgccatctgcgacggcaccgacattctgatcccgggaatcatgcagcatatcgagagaaccggtatccattccggagacagtatctccgtctatccggcgccggatctgacagagaagaacattgagacgctggttgattacacggagaagctggcgagagcccttcacgtgaaaggtatgatcaacattcagtttattgtggacggcgacgatgtgtacatcatcgaggtgaatccgcgttcttcccgtacggtgccgtatatcagcaaggttaccggaattccgatcgtgccgctggcaacacagatcatctgcgggcggacaatccgggaactgggctatacgccgggacttcagccttccgcggactatatctccatcaagatgccggtattctccttcgagaaaatccgcggcgccgatatcagtctcgggccggagatgaagtctaccggagagtgtctgggaatagcgaagaccttcaatgaggcgctttataaggcgttcgagggagcaggcgtacgtcttccgaaatataagaatatgattattacggtccgcgattccgaaaaggaagaggttgtggacattgcaagaagattccaggcacagggataccggattttctctactgcgggaactgcgaagttcttaaacagccacggagtaaaggctctggcggtaagaaaactggagcaggaatccccgaacttactggatctgattctgggacacgagatcgatctggttatcgatatcccgccgcagggcgcggataagagccgtgacggtttcatcatcagaagaaatgccatcgagacaggcgtaaatgtgctgacatctctcgatacggcggcggctcttgtgaccagtatggagaacagggcgaacgaattgacattgattgatattgcaacgatttaaaagacagacgggcggcagccacagggggaaatacctgtggctgccgtcctttcagattgttagggcaaaacactggctttctaaaagattccggatagtcagctgttgacaggttattacacatgtggtatatttataacataatatgataaatataccacatgaaaggagaaaaatatgaaatacggttatggctgtctgggctttctggcgctgttgggtatactgggaattgtcacggaggaacgttctttcctcgcattctttggatttgcagtagattttcagtactttttcagaaagacagatgagatgatgatcgaatatatgaacaagtctgctgccagggcatttatgtgcggtatgcttataaccgctgtggtgacgctgatttacgcagcgctttatgggatcaacagggcgcttcttatcgggatcgcctgggggtggagcgcatcggtgctggtttatgcgttatcgactgcctggtacggtataaaagaaagctggtggacaggagatgattaaaaaccggatcaaagaataccgggcccggtatgatatgaagcaggaagaactggcagacagagtgggagtacgacgtgagaccatcggcaacctggagaaggggaaatacaatccttcccttgttctggcatggaatatcgctaaggtcttcggcgccacgattgaggagatatttaccgtagaagaatcgtgacgccatttgctgccgttctgatttagctctctgatttatggaatttaaagaagtccagagtctcggcaatgtcggcctcgtctgtaaacaggccgattgccttacctgcttctactgcaaagtccacatatccgtttggtctggcggtgacgagaagtccgtcgctcacagccagatcctggcttgtccgaatgctgttttttccttccagaaaaccgtactcctccagaagatcgacgcctgcacagatggcgcagatacaggatttgtcccggtcaaggctgtgaaggaaggcgcttaagtcctctcccctgacacgggagatatcgccgcccgggatgatgaaggatgttacttcctccggatcgatatcctctaaataagtgtcggcctgaacacggaacccttccgctgtccggattgtgtccctgtgcggaccttctgccggtacggccatgcagtaggagcatggctgttcccccatattggaatatctcatgaaataccccaaaagtacaatttcatagaaacagcaatcgtcataaatgagaatatagttcgtcattgaatgctcctccattggtatttaaactgaaagatgatctaataattattcaaatgacgccacatattcgtcaaccattttcaggtaaccattcttcttttcttctgaaatccaggaaatagagaaggcgtttttgacgatctgaatcacatcttcccgagacagttcgtaagcctcagcgaggctatacagatcatcggaaatatagctttggaaatatgccggatcatcggagttgacggttacctggattccctgatgcagcagttccagaatttctttgcccttcatatcgtccactacaaagctgttggatacaggacagcaggttaaaccgatctttttttcttttatataggcgacgagagagggatcttctacaatattggttccgtgatccagtcgatccacgctgatatccatcagtgcctggcggatatgctcgatggagccctcctgatcgatatcacagtgcatggtgatatggaagccgtctttttttgccagagcaaaaacctgtgcaaacttctgcggcggattgtcgcgttcatcggaatcgaggccgataccaataaatttgctgcggtaaggcaatgcggcaagataagtttccatcgctgattctgctgacatgtcacgcaaaaagcacataatcagatttgcctctactccaaattcacgggcctgctgtgttgcctcatagtatccattaattacagcttcaatggggacgccgcgtgatgtatgagcctgtggatcgaaaaacagctccgcatatttgatattatgttctttggcctttttcaagtaatccaatgccagggtacaaaaatcttctgtatgctgcagaacattcatggcagggtaatagacttttaaaaatgatgtcagggaatcaaactgatacgctgctttcacctcttcgatggtatgctgtccaatatcaatgttgttcttctgtgccagatgaagctttaattccggctccagagttccttctaaatggagatgaagctctgctttgggtaaaccatagataaattcttttgtaactttactttgtggcatgtcattcttcctttcctgattcatggtttatagttgtatttcataaaatctcatttttcataaaatttcgcaggcattattgcaccgacaggatacaggcttttctacaggagatctcctctgaaatcaccgattgatatcaatcattctatcactttgattaaaaattgcaataaaagaatagataaaagcatgtggtgcccctgacggaggaaaactggaacaacaaatagtcttcagtgaaagaacgatggttaattacttatgtgtgagaaaatgaaacatttcaaaaatgaaagacgaaaacaacgaatacgtagtgaataatatacaaaagaaagacgataaaatgacctaaatatagaaaaaataatgcagtattgactatgaaatcttagtgagttacacttgtttcataaataaatgaaacgttataaaagcagattgtttcgagactgtacagcagactggaggtgggatatatgtctacgataaaggatgtagcgagagaagctggagtatcattaggtaccgtatcaaatgtgttgaacggcaagcccaatgtaaaaaaagagaataaagaaaaggttcagaaagcgatcagaaaagtgggctttcaatataacatggctgccagctttcttcgcaccaagacatccaaaaatatcggactgattattccaagcattacgaatccctattatccggaattggccagaggcgtatctgattccgccagaattgcatcactgactgtgtttctgtgtaatgatgacagagatgtcagcaaggaacaccggtatgtagatgaacttctaagtaagggggttgacgggatcattcttgtaaagccccagatgaatttgtcggaactgaaggaactaaacaggcagactgcccttgtactggttgatgtaggagaggacattgattcagagtttcatgtgatcaatgtctgtgatgaacaggggatcattcagggaatgaccctgctccggcagtacggccataaaaaaatagcgtttgtcagtggacttttagaatcgtattccagtaaatgcagggtacagacctacaggagatgccttgcggactacggatttgattaccggccggaatatgtgatcagcggtaattacgactggcagagtggttatacggcaaccaggcagttaatgcagcttcaggacccgcctaccgcgatttttgcctccaatgatctgatggcgctgggtgtaatcaaatcagctctggaaaagggaatccgtattccggaagagctctctgtattgggatttgatgacattgacatgagtaatctgtgtacaccttctcttaccacgatccatcagcccaagtatgagatcggaatagaaagcatgaatatgctgctggcctgtatgaatggggaaatgccgaagaatggtatgaagacaattttggagaccaggctggttttcagggacagtgtaggatatgcgtaagagttttatttaccataaaaatgaaacgtttcatttaataaaaggaggacatcatgaaagaggagtttatctatattggcagtgatcacggcggattctcattaaaacaggtgatcaaagactgcctcgacaggaaagggattctgtataaggacgtcggatcggattctgctgaaattgtaaggtatcccacatatgcggaggaagttgcactggctgtatcagaacatcgtgccacaagaggaatactgatctgttctactggtattggaatgagtattgtggctaaccgtttcaagggagtgagggcgtcactctgtactgacagttatatgggaaaaataaccagggcacataacgactctaatatattatgcttaggagggaaaataaccggagaattggaagctgttgatatcctggagaactggcttaccactgagtttgaaggaggacgccatacgatttctctggggctgattgaagaacttgactgtaacgggaaatgagcagaatacaggaaagaaatgggggagaaatgtgaaggtagcagtaacaataggcagcgatcaggcaggagattccgctttcgtagtctggagaggatttgaagagtcaattcgtaaagccgcggcatttggctatgacggagtagaactggctatgagatccgcgaacgatgtggaagcctgtgatttaaaacgatggctgtctgaaagcggaatggaggtgagctgtattactaccggcaggatgtttgcagaagatcatctgtattttacgcaccctgatcctgagatcaggaaaagggcgaaggacagttataaaagtcttattgatatggcatcagaatattgtaatctgatcaatatcggacgggtcaggggtgaaaagggaaaagagcagtcggaggaggaggcagacaggctgtttctggatgcttacagggaaatttgcagctacgcagaaaaaaagggcgttcaggtattaattgaaccggtgaaccggtatgagatgaatttgattaacagcctggatcagggagctgagtttttgtctcgtgcaggatgtcccaatggggggctccatgcggatgtattccacatgaatattgaagatgacaggattggggagagcttaataaggaacggaaactggatcaagtatgtacatattgctgattcaaacaggcttgcgcctggcagcggccatctggattttaatgagattttcactgcgttaaaaagggcagattatgatggctggatatcaatggagatgctgccggggaatgatcccgatgaggaggttaaaaaagcactcaaatacatttcaccctgggtgagcagaaatgactgtgaagaagaaaaaatggaacagctgagccgtaaatttcgaaaggaattgattcagcttcttcacagtaagggaactggccatcccggcggatcactgtcctgtgtggaactgctgaccacgctgtactataagttcttgcgggtggatcccaagtgcccggacagagaggggcgtgaccgcctgattctgtcgaaagggcatgcggctccgatcctgtactgcattttagccgaaaaaggtttcttccctgtggaagaactggaaacgttccgacaggcgggaagccggctgcaggggcatccctgccgccacaaaactcctggtattgaatgttcttccggaccattgggcctgggactgggggcgggactcggcatggctctggcagagaagcttaagaagagtgacgcgaggatttttgtagtcatgggagatggggagattcaggaaggtgccgtctgggaagcagcttctgccgcggttaaatacaggctggatcatctgactgcggttctggattttaatggagttcagctggatggaacactggaagaaattttgcctccaggtgatctggtaaaacgatgggaggcggtcggctggaatgtaatcagttgtgacgggcacagcattccggagattatgaagtctgttgagctggccaaacagtgcaggcagaagcccagtatcatcattgccaaaacagtaaaggggagaggagtgtcctttatggaaggaaggcatcagtggcatgggaaagtcataaatgatgaagacttcaagagggcaatgcaggaattggatatggaaaggggggaacagagtgctggcgaatgaaggtgggaaaagatattgttctgtgcgcgaagcctatggaaaagcgctggcagaattggggagaacaaatgaaagcgtggtagttctggaagccgatgtgggaggttccacgaaatcatcacttttcggtggtgaatttccggaacggtatttcaatatgggtatctgcgaactgaatatggtcaatacagcagcaggactggctatggaaggttttactccatttgtaaatacgttcgcggtattcatgacttccagagctcttgatccgattcagagtatgattgcctacgatggtttaaatgtaaaacttgcgggggcatattgcgggctctctgattcctatgacggggccagtcaccaggcaatcactgatatagccgtcatgaggaccatacccggtatgaccgtagtgtccgtcagtgacgcggcagaggcagaggcagcagtccgtgctctggcggattatccggggcctgcgtacttaagactcagcagggcagatgcaccggtaatttatgaaaggggatgtgattttaaggttggaaaaggaatcgtatgcagggacgggaacgatgtaaccctgattggaaccgggacagtcgtttcgcggtgcctggaggcggcagccaggctgaaagagctgggaattgatgcagccgtgattgatatgcatacgataaagccaatagatgaatcattaatacttaagtatgcgaaaagaacaaaagcaatcgtaaccgtggaggaacattctgtctgcggaggctttggaagtgcagtggccgaggtcatcgtaaagagatatcccataccgatggacatcatcggcatagaaacgtttgccgaatctggggattatgaggaattgctggataaattcgggttggggagccagagaattacagaagcgtgcagacaaattgttcagagaaagcaaaattggaaaggggattcgttatgagaagaagcggaaagatgaagatcgcggcagcattattactctgcagcacagttgttttgggggcgtgtggttcggaaagcagtcagaataaggaaactgcaaaagttaccgaagcagcgggaacggcagccagtacggaattggcagcgggagaaccggaaaaacaggaagatggattaaccggggagttgaatatctttgtacatgtgggatcgatggatattaatccggtgattgaaaagatgcagcaggagaatcctgatttaaagattaatttggaaatgggttcaggaacccaatatgagacggtgctgaagaccaaactttcggcgggagaggctcctgatattatgacggtatggccgggaagccgtactgctgattatgcggcgaaaggttatctggaaaagctgacagaagaaccatgggctgccaggataccagcaaccattaattctgaattctcccttgaagatgatttatatgccatgtgctttacggtaggaggagaagggctcatttataatcaggatctgtttgatcagtataatctgtcagttcctcagaattttgatgagctgctgaacgtatgcgagacgtttcagaaaaatggggtacagccgtttgcctcgggatacaaggatgactgggttattatgagatataccaattcggcgttcgcaacgctcggatatggaagggaacctgactttgataagaaactggcatcgggtgagctggatttttcgtatccgggctgggttgaactgtttgataaatacggtgttcttctggataaacattatttcggagatgccatactgtcaacggacagctctcaggcaattgccgattttgccacaggaaagactgccatgatgattcatacttcctctacgatctcagaaattcgaaaggtatctcctgatatgaagttagggctgacggcaacaccggttaataatgcaggagaagagctgtatgcaaactggaagagcgggcttggatttgcagtaagcagcaagtcgaagaataaggaagcagcaaagcgttttctggaaatatgggcagatccggaagtgaatgaggccctttaccacaacaatggagagcctacgattttaaatgatgtgccgtctaccggaacagatccggcattgcaggatttttacagcaaattcgtcagcacggaaaaatttgcactgggtgctcatgaccgctggccggcagggatgtcgaataactggaaaaagaagcttcaggagtttgtaggccgccagatcaatacagagcagatgattgactggctcaatgaagagtatcagagcatgaaataaatctgaaaagaaaggctgtgtttttatggtcaggcgaaaaagaattttttatcaatcattgttgtttatgctgccggccattctgattgtagtatgtgtggatatcattcctatttttcaaaatttttattattcgctgttttcctgggatattctggagccgtccatgaagtttgtgggacttgataactttatcaatttctttaaaatggatggcgccaggggcgccctgaagaataccctcatttatgcagtgctggctgctgtgctgaaaaatatcgtgggtcttgggcttgcgcttgtgttaaattcaggcttaaagacacagaaatttttgagaacgtgtattttgagtacaacgatgatcagccttgttatcagcgggtatacatggacgtatctgtatcatcccgaatatggtgtgggctatttaattgaaaaatatacgggaatttcctttttaaatcaggattggctcggaaatccgaaactggcgttatatgcggtactggtcgtgtcgatctggcagatcgcaggcaaatatatggttatttaccttgccggtttgcagacagtccccaaggacttatatgaagcaggtaatatggacggcgcgtcgggctttagcaggtttagatatattacggctccgttgattatcccttccttcacagtcggtatcttaaatgcagtgatccagggactgaaggtgttcgatgaaatttactccatgacaagaggcggcccggggtttgcctcagaaacacttactacgctgatgtattcccagacctttttctacagcggaaaagcgggatttggttcggcaatctcagtgattttatttggaattgttttaattgtatcgttactcatctcttcttatttaagaaaaaaggaagacgcggtatatcagtaggacggagaaaattattatgcaaaaaattaggctgcgaaaaattttgttggaactggtgatgattctgtttaccgttatttatatgtttccggtgctgaatctggttttttcctcactaaagtcaaccggtgatctgatgcgcaatccggtcggccttccttctgttctggaattggggaattatgtagtggcctggactaaaatggattacccaagagcttttttcaatacagtgattatatgtgggggatcgatttttttcattgttgttatcggagccatggcggcatatcccatagccagataccgcaccagattcaaccaggcaatgtatcttttctttctggccacgatcatgatacccggtcaggccatcatgataccgctggtacgactgttttataaaacaggattggttaatacccatatcagcctgatcgtctattatactgcggcagcagttccttttgccatatttttattcaccggttttataaaaacaataccgggagagctggaagaggctgcctccatagacggcagcggagcgtacagaacgttctggcgagtgatttttccgctgatgaaatcttctgtaactactgtgattattcttaacattatgtggatatggaatgattttatgatgcctatggtactgctgcagagcggaaagatgagaactttgacaccatccatatttaatttctttgaagagtttgttacacagtggaattttgcgtttgcggcttctgtgctggttatgataccggggattttagtatttcttctgcttcagaagcattttatcgaaggtatggtagcgggaagcgttaaatcgtgaatgataacgagatgtgaggcattgtcccagaggacaggaaaggaagtttatgattatgaatgatcgtatgataccacagattcctccgacaggagaggttatgagaattttgattgattcggacgttgcgactgaaattgacgatttatatgcattgaccatagcgtttggtcatccggaacgttttttaatagaaggaattgttgcggcccatttttcaggaaatggcccctccaattcaaaaaaaatgtctttcgaactgttaaaggaactgcttcaaaaatcaggtatggaagggaagtttccaatagcggaaggctcacacccaatgcagtatgccaatacaccaaatgacagtgaaggtgttgacttaattatccggaaggccatggagtcaacaccggaggatcccctgtgggtgattggaatcggcgcagccacggatcttgcctgtgcactgttaaaagctccggatatcgtctccagggtccgttatgtgttccatgcaagaagtgaacacacctggccggacagaaatgagcagtttaatgtatatggggatattattgcggcgcagacattactggaatcagaagttcctctcatttggtttgatacaggtacgcatatttgtgcttcctatgaagagacggaagaaaaactggcgcctatgggagattatgggaaatttcttcatgaattcagagacagggatgcgtggttttgccagagcgacaagggattctttgatatgggggacttctcgttcctgtatcagccggactggggactgtatgagactgtggaaacgccggaaatgacgcggtttatgtactttaagcatactcacaggcatgggaagatgatgagggtttacgatattgatgttaagaaaacctgggatttattttacgaagcagtaaacaatctgcgaaaaggagtataacatgaaagatccaattcaaaaatattttgatgtgggaacaattcaatggatgacgtatccaccacagacatatccagtttctgaggctcttaaaaaaattgcctgcgacgactatttcggagctgttgagattacgcatattgaagatatggaggccaggagacaggtgagagaaatgttgcggcagtctcacttaagggtaagttacggtgcccagccggcacttttagggacgggattaaatcccaatgacttagatgatgataagaggctggaggctcagaatctgctgatggcagccgtagatgaggccgagtatatgggagcgggtgggattgcatttctgtcgggaaaatggaaggaggaggcgaaagaacagtcttttcgccagcttttaaagacttgcgaggcggtatgtctgtatgcgtcagaaaaaggcatgatggtggaactggaggtctttgactttgatatggataaggccgccctcatcggaccggccccctatgcagccgagtttgccgcggagataagaaaacgatgcagtaattttggacttctggtggatttatctcatttcccgactacatatgagacttcggaatttgtaattcggactttgcgtccctatatcactcatttccatattggaaatgcagtcgtccagaaggcaatggaagcctatggagatcagcatccacgctttggttttccgggaagcgccaacgatactgcggaactgctggatttttttaggatcttaaaggcggagggatttttttactgcagaaggccgtatacactgtcgctggaagtaaaaccatggaaaaatgaagatggggacattattctggcgaatacgaagcgtgtcattaaccgtgcatgggcattgttggaggaatagaacatatgaagattgttattttggatggctatacggaaaatccgggagatttatcgtgggaggatttagctgctttgggagagctggaagtatatgacagaacacctgcgggtgagatcgaggaaaggatgagcggggcagaggcggtgtttaccaataagacacctatatcacgccatgcaatagagaactgtccgtcacttaaatatattggagttctggcgacaggatttgacgttgtggacatcagggcggctgcagaagccgggattacagtcaccaatgtgccctcctatgggacagacgcagttgcccagtataccatagcgcttctgctggaactctgccatcacgtgggagcacattcagacagtgtaaaagcaggagaatggacgaagagtgcagactggtgcttctggaattacccattgacagaattgtcgggaaagactatggggatcatcgggtttggaagaattggccagaaaacagccaggattgcagaggcgcttggcatggagataaaagtattcgacgcagtctgccgaaaagaactggaaacagagcactgccggtatgctgatctggaagaactgctggcagtatcggatgtgatctgtctgcattgtcctttgaattccggtaccaaaggaatcatcaaccgcgatacaatagctaaaatgaaggatggtgtcctcattatcaatgactccagaggtcctttgattgtggagaaggacttaaaagaggctctggagagcggaaaagtagcgggagctgccgtagatgtggtatcagaggagcctgtcagggaagataatccgcttatgacagccccaaacatgattattacaccgcatattgcatgggcctccagagaatccagaaaacggctgatggatatcgcggtggataatttgaaaagctttctgcaaggaaggccccagaatgtcgtatctgtactgcggcaggaaacagtgtaagcagctgacttttgtattattaaaattaagatgcatctgtaagttaccggataaaggtattccttacagatgtattttattgcagaaaaatgcattagatggaaccttgttttcagcggcacagtaacaattgacaattccccccggttgatggtaatattaccctggatcaataagagagggtgagaacgatgtaatggttagtttataagcgaatctgtaacctgggatggaacgcattatgcgggccgtcttgttttgatacccttataaacgatacttttacaccgtgcacacgctcgaaaaagaacttctttttcgtctgtttgtgttgtggataggtatgggccacagcttttttgtttcacaggaagaatgaagccgtggtgtaaaaacgggaacatagagagaaagaagtgaataacaatggaaatgatttataagtatccgagaacccgccatattgagggctccagaatccaggcgggagacgaggatttaaaaaatgtgagatttgaagagatccggaatcgatttgtcgttttggaggaaaaggtggatggagccaactgtggaatcagtttttctgatcagggaaaactgatgcttcagagcagaggccattttttaaacggcggctacggtgagcgtcagttcgatttattcaaaacgtgggccggctgctttcagacggaattatatgagatgctggggaaacgctacgtcatgtatggagaatggctgtatgccaagcatacggtatactatgaccggcttactcattacttcatggagtttgatatctatgataaagagaacggggtgtatctaagcactgcggccagaagaaagctgttgaggcagtgtccctttgtggaatcggttctcgtattgtatgagggccgtctggattccctgaatcaactggtctcttatttgggcagatcgcatttcaaatcggaccggtatgaggaatctctgagggagcagtgcgaagaacaggggcagaactgggatctggtgaaacggcagacggataggtccgacctgatggaaggaatctatattaaggtcgaagaggacgatatggtaacggaccggtttaaatatgtgagaagtacattcttaaatacgattctcgattctgagactcattggctgaaccgccccgtgattcccaacaggctggcaccgggaatccatttgtttgaaaatccggctggcagaggggagagtggtctctgatggaaaagctggaggatttcctggaacgaaaggggtatgaatgggaagcgctgctgccggaatttcccggacttatggcactggatgagacagcgcaggatccggaataccacggtgagggcagtgtactggagcatacaaaaagagtctgccgggccgtggtttcgggaacagagtggaaaaacttaaataaacgggacagagcggtgctctatatggcagccatgtaccatgacatcggcaagaagagcaggaccatgcaggatccttcgggaagaattatttcccccggtcacgcgattgcgggggcgaaggcatttcgggaggtctgttaccgggaactggagggagggtttcagattccgttttccatgcgggaagagaccgcgtggctgatccgttaccatggtctgccgcttctgtttatggaaaaggctgaaccctcttatgatctgatacgggcggcggaaagcgtttccctgccgcttctgtatcagctcggaaggtctgatgtacagggacgggtgtgttctgatcagaagaatgcgctggaaaccacggagtactttaaaacgtatgcaggagaactggggtgttacggaaagaagatttcttttgccaacgagtacacgcgtttttcctattttgagaaaagagatttatggtacggagacaggctttatgacgcatcggaattcgatgtctatgtgatggcgggccttccgctggcgggaaaggatacgtacataagtgaagaactggcaggctttcctgtagtttcacttgacgatatccgggctgaaatggggatccggccggatgagccgtcagggccggtggcagcggaagccagggagcgggcgaaggcgtatttgcgagccaagacttcctttgtctggaatgctacgaatctgattctggataaccggcagaaggtatgcaggatgtgcgcggcctatggcgccagggtgaatcttaagtatctggaaatgccctatgcagaaattctgaaacggaatatgattcgggacaggagcgtgccggtcgatgtaattaaccgcatgatccacaagatggacatggcagagtgtgtggaagcgtaccgcacgaattatctggcaggtggtacgcagcggtaaacaggaggagaatgttatggttttttatatcaataagcaggcggtggagatcaagacgcggttcgaaaatgcgccgctcacttcacccaatgaggcatgtgcggcaatcggcatgctctgcaaattatatggtctgccgattccggaaaaacgggagatggtcagcgagatgaaagccgatttaaacgccgctttgaaaggacgtcaggctccatcgaaatttgcggagaagataatcagtctgctggatggatattttaaggatgatccggtgacggatgaaatctatgaattgttgaaatacagttacgaagaacagaaatagggattcgaaaaatatgcgcatagagtttacaagactctggcgcatattttttaggattatgcactatgactcatctgtgcacataagaaagaattgaaataaatgacagatacggtaaaatagggagtgaggagggagatgattccgtgatcacgagagaagatgtggcgaaaagggcaggagtatcagtcagcgcagtatccagggccatgaatcacaggggatacgttgcaaaggataagaaagaagcgatttacaaggcggtggaggaactgggatacaggccgaatccactcagtcattctttgaaaaacagacagacgtatcagttatgcttttttggagccgatatttacaattccttttatatggaactttttaattatatgtccgattatgccgcggagcgggggtatacgatgttccttttttctgaatttaacgaggagcgggttaagaccatgctgatggatggcatgattgtggagaatgatactgtggcggagaaggtgcaggcacttcttggggaacagttttttatgcccatcgtaaccgcctcctatggttcccccattgtcagtctgaaacggattccgtatgtggatgtggatacacacgatgcagtggagatcgggctggcatatttaaaaaagatgggacataaaaaaacagcctttgcaactccttacgatttttttggagacagcagggtcaatccaaggcatgtggcctttggaaatcagatgaggccggtttatggaaaaaggttaaaagattatgtgatcgataataccggaaaagcgcgtctgccctttgccagagaaaatttctttgaggaggggatgaactgtgcagaccagtttctggcccgtaattgtgacgctacagccgtcatctgctttaacgatgagtttgcgctggggatgatccggcgttttgaacagatgggcatccggattcccgatgatctctcaattcttggtatcgacggaattgagaacagaaagtatgtgacgccctttctctcttccgtatccctcaacatcaaagaacaggcagagtgctgtgtcagcacgcttctggacatgattgagggacggagagtaaccttttttaactcccttaagccgtatctggttgaggggaattctgtaagagacctgagcatggaaaccatcaaacgataacaatacaaggaggggagacgatggggattcattttggagttgactattatccggaacactggccgagagaacggtgggaaaccgatgccagacttatgaaggagatgggactgtcagtcgttcgtatggctgaattttcctggcacaagctggaacctcaggagggcaggtatgacttttcctggctggatgatgccattgctttgctgggaagctgcggcatacggacgattgtaggaacgcctacggcagcgccgcctgcctggatggcaaaccggtatcctgagattcttccggtggaccgggagggaagaacgagaggatttgggggaaggcaccatgactgtcagtcaaatccggtttaccgggaatttgtacggaaaattgtaactgccatggccatccattataaagataatcccaatgtcatcggatggcagccggataatgagctgggaaacagccatcacgatttatgtatgtgcagcagctgcagaaagagcttccaggggtggctggaaaagaaatatggcactgtggaccgcctgaatgaagcctgggggactgcattctggagtcaggaatataatgaattttcagaggtttttactccgaagattacggtgacaggtgagaatccatctgcgatgctggactggaaatgcttctgttccgacctgattgtggattttatgaaggaacagacggagataatccgcagatactgcccgaatcattttatcacccacaattatatgggatttgccgataaggtgaactattatgatctgggaaaacagctggactttgtcagccacgatcagtatccgggtggatttttcgccgacgcttcccatgaacggggagatatgactgcctctgcgctcgatgtggtcaggagttttaagaagcagaatttctggattatggagcagcagtccggaattaccggctgggaagtgatgggacgggctccggctccgggacagctttccatgtggtcgcttcagtcggtggctcacggagccgacgcagtagtctatttccgctggagagtctgcgccatgggaacggagcagttctggcacggaattctgcctcacagcggaaatcccggccgcagatatcacgaattaaaggaaatgatccggaatgtatcgccgctgatggagaggctggaaggctccatgcccgttccggaggttggcatcgtatactcgtttcgccagaattatgcccttcagattcagccgcagaatcgtgcgatgtcgtacattgaacagattcaggagtactacagggctttttacgaaaggcagattccggtcgattttgtaccggaagacggagacttcgggaactataagcttctggctgcgccgctccagtatttaatgaatccggaactggaggaacgctattttaactacgtgaggaatggcggtcatctgattcttaccatgagaaccggggtcaagaacgataccaatctctgtatgacagaccgggaacttcctgggcgtctgtctgaactgaccggctctgaggttctggattacgactgcctgagagatgtaaaagtaccggtgatctgtcaaaatacagagtatacggcccgtaactggtgtgatctgatgcgggtgagagcgggtgtggaggttctggcagtctatgccggtgaattctacgcgggagagccctgtgtgacgaggaacaattacggaaagggctgctgctattacgttggaacggaacctgaccaggctctgatggccgccctggtcggctgtatggctgatgcggcagggatcacggaactgggaagtgcagaggagggggtagagcttgccgccagagagaaggatgggaagaggtggctctttgccatgaatcatacggcaggggagagaacctacacggtggattcagcctaccggatgatctacggcggggaagcaggaacgctgaaggggtatgaagtgcagattctagaaaaaaatgtctgaggtataccggatgaaacggaaagatgctgaaaacctgattaatacaggttttcagcatctttcttgatcatggagatgacagggctcgaacctgcgacttcttgcgtgtgatgcaagcgctctcccagctgagctacacctccataacagttattttaccacgttggcagaaaaatgcaagaaaaattattcgaatttttgaatttgtttgtgttttgatgaacagaaaaaagcagcgattggatgaatcaaccgctgctttttatagtgggttacttctttacaaactgtttgtcgaattccggattgaaataatagaagttcttcgcatccagattggactttattttctccagcgcctcgccgaatctctgaaaatgaacgacttcacgttcacgcaggaacttgagcggttctctgacttccgggttgtcgatgatgcggattaagttgtcgtatgtggttctggccttctgctcggccgctaagtcttccgttaagtcggtgatggcgtcgcccttggactggaactcacaggcgttaaacgggacgcctgccgcggcggtgggccacagagccgtggtgtgatcgacatagtaggcgtcaaagccggcagtttttgcctgctccggggttaaattctttgtcagctggaagacaatggcgcagatcatctctaaatgagccagctcttccgtaccaatatcggttaaaagtccgcctacttccttgcatggcatggagtaacgctgggaaagatatctcatggaagcagccagctctccgtcaggaccaccgaactgggtgatgatgagagatgccgtcttcgggcatggagtcgaaatttttacaggaaactgaagtcgtttttcataattccacattagacagtacctccttcccacggaagcgggccgtcagaccaggtaaaatgcttctgtcccggatacttcgtgtgggtttctgatttgttgttggtatcggggcagacacagtcgacggtcagcggttcaaagttctccgcgtacgtctgcatcagctgtttcctctgcttcatggcgtcgctgaaagcctttaacgcattgtcatcaagtggatgagtatcgaggaacagggtcagatcattgactgtgaagctgatttcattaatctgttttaacatcgtttcgcggtccgccattatttgccacctccagtcacataaaacggtaagtcgagacaagggaagattgttccgtgctgcagagcggcagcaggctcatacggctgttcccagggctgcatcggtactgtcgcgatcgccagatttaaagcggcggcaggtgtgcttttgtcactgtcggattttccgcagccacatgaactgtttgaattcaaattcataagaacactcctttcatgttgcgttgtaaagtttcttctcttctagtatctgccgtgcgcataaaaatacgatgcaaaaaatatgccagaataaccaattgccttattgtataatgggccggaataaaatataataataaatatcactaggataacaggagatcaaaacattgaatgacaagaaatttgcagtactaatcgattcggataatatttcagcaaagtacatcagctatattctggatgaaatgacgaaatacggcgtcattacatacaaaaggatctatggagactggaccagctcccagatgggaaaatggaaacaggagcttctggaaaattccattacgccgattcagcagttttccaatacggtgggaaagaacgccaccgactctgcgctgattatcgatgccatggatttgctgtataccgataacgtagatggattctgtattgtttcgagtgacagtgattttacgaagctggccagccggctccgggaatcggggaaggaagtcatcggcatgggagaagagaaaactccgaaatcattccgcgccgcctgtaccgtgttcacgaatttagagatcctgcttgaccaggatgaggagagtgtaggcggcgggaccgtcggccgggaagtgattgaacaggatatcgcttccattattctggaaaacgatgacaaaaacaaggcgacaggtctgggtgagatcgggaaccgtctcgtcaaaaagtactctgattttgatgtcagaagctacggatacagctcgctgtcgaagtttctcgaggagatggacagctttgaactgaaaaaatccaacaatgtggtgactgttcgtatgaaggacaaccgcaccagaaagcaggaactggatgattacgccataaagctggtgaaaaacagcggaaagaacggtctggagctggcagctctgggcaacggcatgcacaggaaatacggagatttcaaggtcaaggattacggctactccacattttccaaatttgtgcagagcatcagccagctggagatccgggaaaataagataaacaataaagtcgtcttcatcagacaggcgtagtacgaaaggaaagagggaataacgatggtgcgttacagctttggtaccaggctgaccagactttccgacgaagaaggcaggaaccgcgccggcacctgtattacagtcatgacgctggaggaattccgggagacgaaggaattgtaccttcaccggaaggttatggtgcactcgatggagaacattcattactgtaaagcggaagcgtacggcggctgcacgatggggacctttatgatcccgaacaagaaagatttattgggagagaaattttcctttggtttctatgtgactgatacagaactgattctgctcgacgaaggggatatgatgacggatatcctcagatggatggaggacattgcgtcgaaggaaggggctggtcatggccacacgggagaggaaacgggaaaagagaaagagacggctgccgctccggcgggatttttgattctgttaatggattatctgatccggaatgatgtgcttttcctgcagaagtacgaggagaagctggaggacatggaggatgagctgctggatcaccagccgaagaatttctatgagacagtgattgtaagcaggaaggaactgcttgctctccacacctactatgaacagctgatttctctgggagaggaactggaatccaatgacaatcacctgttttccgagggggaatgtaccggctttggcatgtttgccagcagggccagccgcctgcacgatcatgtggagatgctgcgggagtatgtgtttcagattcgggagatgtatcagtcccagattgcctcaaaccagaaccagattatgagctggctgacggtggtgaccacgatctttttaccgctcagcctgttggtgggctggtacgggatgaattttatcaatatgcctgagcttcactggaagtacggatatgtggggatgattctcttgagcatcgccattgtggcggtggagatatggttttttaagaaaaagaaaatactataggagaaaacgatggaaaaaaaggaaaaaggatcgtttgtcggcagtatacttctgtcctccccggtgtgggatgcagaaaagcttaaaagggacttgctggaggagtgggatatccgcgtaccggatctggaggctgatgaggaaggaacgggcggagaaccgatgggcagagaacagccggacagcgatcagccggggcaggaggcgtcagactgtgggaattcggataacgataccatcgttttcgaagctgatgattatatggtggccatcagcctgatgccggcgcctgtgcctgcaggggaggcggaatactacgctaagtccaactatttctggaaaggcgcggtggatgccgccagtgaacaccgggctcatattctggttgccgtgatagggggaagggagcgggatccgtttgaagccgggaagctctacgtaaagatttcctcggcctgcttaaagcaggaaaatgctctcggaatttatacctccgggaccgtgtttgaaccggagatgtactgtgccgtggcagaggagatgaaagaggaagaggagacgtatccgattctggactggatttatatcggcctgtatcagacggaaaaagggatgaacggttatacttatggcatgaccgcttttggaaaagatgagattgaggtggtggaaagcgcggcagcgcctgcggaacttcacgaatttctctttgatattgccagctacgtgctttacgacgatgtcctgttacaggatggggagacaatcggctttacggaagatgagaagcttccgattacaaaatcggaaggtgaggcagtagaaggcgagagcctgaagatcgccttcatgcctgcgcagtgaaccgcagcagtcccattgcgggactgaactgctgaaaggattgcgtatgcttccattgaacgtgcttaccagacgcccagaaaactctgcatggacaggctgaccagggtaattccaatccagcagcataatcccaaaaggattggtttcatccctgtttttacgagcgtcaccaggtttgtgttggttccgatggaagccatggccataatgataaagaatttacttaaatcttttagcggtcccgtaactgcggcggggagatggaacacggtggtcagtacggaagccagaaggaagaacagaacgaagaacgggaatattttcacaagctggaaggtattgccggagccgctctgttcttttttggtgcggtaaagtgccaggaataaggtgatcgggataatcgccagggttcgggtcagcttaacaatggcggcagcctccagcgtgttgcttccgtagagaccgtcccatgcggcagcggcggctgtgacggaggaggtgtcattgatggccgtaccggcaaacagcccgaagccttcgttggaaagccccagagcggcgccgagcgcggggaaaagtaacgcagcggcaatgttgaataagaagatgacggaaatggactgcgcgatttcctcatcatccgcctcaatgaccggtgcagttgcggcaatagcggaaccgccgcagatggaagaaccgaccccgattaaaatcgcgctcttcgtaggaagctttaagagccggtagagcagaaccgcaatgagaatggatgtagtgatggtagccagaataatgggcagagactgccttcctttttccagaaccacggataagttcatgccgaaaccgagcagaacgacggcgtactgaagaatcttttttgaagtgaacgcaattcccgggcggaaacgttcttttccttttataaacggggcaattgccattccgattaagatggcgcagacgggaccgcccacaaccggaaagagcctgcctaaaaaccaggccggaacggagatggcgagacagatcagaagccctgcggtatattttttcatagataataattcctttcctgtttgttatgatcatgatatcatggggataaaatttttggccatggaaactgttaccattatacagaaggataaccattaaataaaattctaaatatttatttattgataaatatatgttatgatatgaaaaatggaagtattttacgaaaggagaaaggtacagatgctggattttcgaatggatacatttcttgccgtatgcagatgtatgaattttacaaaagcggcggaggaactcaacattacccagcctgccgtgtcgcatcatattcactatctggaggagcattatcaggtgaagctgtttgagtacagcggaaagaagatcggacttacggaagcggggcggctgcttctgtcggcggcgacgacgatgcagcacgacgaactgcatctgaagcaggcgcttaagatgtcggaaggcgggggacgccgtctcgtgtttggcgcgaccatgaccgtgggggagtacgttctcccggaagccctgatgcggctaatggatgcccagccggatatttccgtgaaaatggtggtagccgatacccaggatctgctgcggagtcttgacgagggggagatcgaatttgcagtggtggaaggtttttttcaaaaaaaagagtacgattttctcgtttatgacagagggaagtttgtgattgtggcttcgccggaataccggtttcacagcgagggaaaggtgattgaggacctgacgcgggaacgattctttatccgggagccgggatccggtacgagatatgtgtttgaacggtatctggaaggcaagaatctcctgatccacgattttgaggatctgatggagatcagcaacattggggccatcaagagtctggtggctgacggacggggaatcacatttttgtatgaggcggctgtgaagagagagctggaggagggaagcttaaggcgagtggaactggaagactttgaactcagccatgattttacatttatatggagaaaagacagcatctacgctgactactaccgcgaactgtaccgcctgcttcgggggagtgaactgtaacggcctctattttctgaaagaacactcttgacagaatcaactgtatctgttattgttacagtgtaaactgaaatgataaatgttacagtttgccgttaaaagcggcgaatggtgtgaattggagtgataaatatgaagagaggcagatcgagaagacgccgtcgtcaggccagaatagtaatgtatggtggaaccgtcatcttattaactgcggttcttggaactgcaggtctggcgtttggacggagaggaggcgtcagagggcaggaatcctccgtgtcagagaacggtacggcagtcatagcggaacatctggcagagacggtaacggcgtatgaaaaaacagttgtcgagggaatcgatattaccggtaagagccggggagaggccgagacgcttttgaaggaaaagatgaagggactgtcagttgtctggcaggatgagacggtgtctgtggaggaagtaaccggagacgcggtcgcaggacttctggataaaatctatggggacggtcagatgaaatccggtacatttaccctggatgcggattcactgaaggagtccttcactgttcttgcgaaaaaacttgccgggaaatggaaccgcggggcggttgattcccaactggcttcttttgataaggagaccggtatctacacgtattcggaggcaaaagcaggaagctcgctcaatgaggacgaactggtacagagtcttatggaggcagtgaaggcaggaacttatgagactgccgtgataccggaatttacggagatttctccgaaacgcactgcggcgcaggcgaaggagcagtaccaggtaatcggaagctttaccacgaagacgacaaataataaaaaccggaatgagaatatccgcctggcggtggaagcaatcgacggccgcattttaaagccgggtgaggagttttcctttaacctggctacggggaaccggacgaaggacaagggatatcagcctgccggtgcatatcggaatggagtgctgattgaggaaccgggcggtggtgtgtgtcaggtgtctaccacactttacaacgccatcgtaagttcggggcttacagcgacggaacgtcattcccacagctttactccgagttacatacagccgggagaggatgccatggtcagctttgacggctatgccggacctgatcttaagtttgtgaattcggcacagactacagtggcggtccgcgcgtctttaaaggataatacactgaagatctccattgtcggacttccgattctggaggatggcgtgaaggtgaccctgcgttctgagaaggtgagggacgtcgagcctccggcgccggtatatgaggctaatgacgggcttccggccggtacggaaaaggtcgttgaccaggggcagaaaggcggagtgtggaagacgttccgcgtagtgacgaaggacggaaacgttgtggaagagacacctcttcacaatacgacgtaccgcggtaaagcatcggtgattcaaaagaatgagaatgcggctggcaccggtgagaactctgccgaggcgggagcaaacgagagcgcagcaggaggacagacgcaggagaatacaggacaggcagccggtgccgggaatgcggaaggcgggagttccgggcagcaggaagggatgccgcaggatatcagtcagcagggagaaccgaagcaggaggcgggccagcaggcagcacagccggaggccgaaccgcagcaggagccgcaatcccagcagacaccgtcggctgatgctgtcgtggtaccgacttttccggggtagagtgaaagaatcgcaattatactgtctgacgccttccggccaggaaagaggaacagaaaaagaaaaagagtggacaatgcttgacagaaagggagaactctcatgagaaaagtatggaaaacatcagaatatcatatcgacaataccggggaacgtctggttacggaagcacttcaggcacttattgatgagacgtcgcaggcaggaggaattctggttctggaaaaagggacctatctgacggcaccgttgtttttaaagagcggaatggagttccattttgaggatggggcggttttaaaggggactaccgatgagacaaagataccggtgattccgaccagggcagcagggatcgagatggactggtatcctggtattttaaactgcaatgggcagaaagatgtgatcataagcggaaacggcgccatagacggccagggtgaatattggtggcggaaatactggggagatgacggaaagagcggaatgcgcggcgaatacgataaaaaggggcttcgctgggcctgcgattacgactgtatgcgtgtgagaaatgtggtgattatggagtcatcccggatcacactgaaagatattacatcaatgagatccggtttctggaatatccatatctgttacagtgaccatatccatgtggatggcataaagattgcatcgtgtgggggagaaagtcccagcaccgatgggatcgacatcgattcctgccacgacgttctggtggaaaactgtgtcactgactgcaatgacgacagcatctgcatcaaatcgggaagagatgcagacggtatccgtgtaaaccgcccctgccatgatatcacggtgcagaactgtgagatccgggcaggctttggagttaccattggcagcgaagtatcgggcggcgtctatcagattacactgaaaaatctgcgctaccacggaaccgactgcggcttccggattaaatcctccgttgcaagacacggctatatcagggatgtgagggtagaaggcctttccatggtcaatgtgaagtatccatttcatttcttcttaaactggaatccggcatacagctattgtgaacttcccggtgattatgagggagagataccggaacactggaaaaagcttctggaagcgataccggattcagtaccgaagacaaaggtcagcaatataacgatcgagaatgtaacggcgcggaatgaagcggattatgacgggatcagccgcgcattccatatagaaggctttgaggaccagcctgttgagcacgttatatttaaaaatgtatcactggcgtgccgggagtttggggtaatcaaccatacgaaggagattggctttcaaaatgtcacggtgtccgtatccggggctcatgatgagaagaatgacagttacgataaccgatagcttgatacagcttctgcactcagagaaaccgtgtgtgaaagctgcagtcaattaaatcttttttagatagtatcagcttcttgaccagagattatatggtgcctggcttgaggcattaaaaaatgaatgaaaattgtatgcgataccggcacaggtgtgataacctgtgccggtattttagcagagccaggtattactgtaaaaaactctgtttcttcatagctttatacatactaaattataaaaaagtgaagaatggtattgacaatgaattgtgcaaggaatataatatgcagcatagagtacacgtgtacgcaaataaaaaatgcatagtaaaaaacgaaaaatatatatcaaaggaataaatttaatgaaatataaccaaataatggaatgcgtttttggggaatataacaaatgccagtgatagagagaaaggagaaggcaaaaaaataccctgagagtttatcggtctgccgcgaaacatacggataaacagtcaggataccttattcagtaccattctaaatgatttaaaggaaaaagtaaaggtttcttttcattaaaatttatatattacagttgttaaacaaccatatttcaggaggttctatatgaaaagaagatttgttgctgcgatgctggccggagtcatggcatgttcactggctggatgtaatacgaagtcaccgatggcaggaaaagaagaggcggcaacggctgcggattcccaatcagactcgaatacccaggctgctcagggggaaaatgaggcagaaaagcaggagaaagctgctggcccgattacgattcagttctggaatgcatttacaggaacggatggtgatgtactgagagagattgtagatcgttataataaagagaatggtaaggatattacgattgagatggatattatgccagccagcagtttagaggaaaagcttccggctgcaatcgcttccaagaccgccccggctcttataatcaggggtaattttgatacggcaacttatacggacaatggaatactgactccgcttgacgatttttttgagaaaaccggtgtggactcttcaaattttagtgaggcatccttgcaggcgcttaaatataatgggactcagatgatgataccgatgcaggttcactccacgttcctttactggaataaagacttgtttgaagcggcaggacttgatccagagacacctccagctacctgggaagaggccggcgaatatgcacttaaaatttccgacccctcgaggaaactttatggaatcggatttcccatcagtggtgccccctgctactttgacgcaatgtttaaagccaatggtggtgatgtcttttcttcagatggcaaaagttctgttctggacagccctgaaaacttaaaaactcttcaatatatccagagtctcgttgaacagggagctgctccagttggttccacaggagccgatacggataatttaatgcttgcaggacagatggggatctactgcggcggaccctggcttatcagcggcctgaaggaagcagagattaactttggtgttacaggaatgcctgcaggagacaaagaggcagccggagtcatcgaggtacagggcctcggcgttacctctacggccagcgaagaagaaaaggcagcggcatatgactttattgcctactggaattcggatgctacctgtaaagaatggtccctgcgcaatgggtatcctccatatttaaagtctcttgccgaagatgctgatataaaagcggatgcaacagtgaatgcgctgtcatctattgctgatttcggattttcgttcgcaccgggaatcaagcctgtaaagcagataaacaatgatattttatttccaatgattgagaatgtggtagctggtaacgatccgcaggaagaactgactaaggcatcagagagcattgataagctgctttctgagtaaacagcagtacatagaggtgatttcattgaaaaatataaaaaccggaaaatcccccgctaatccatctgtcgataagcagggagagtccccagcacgtctgttcagcagaaagtactggaataagccggagcgggtagcatatttatttatgctgccctccatcctggtgctgttcgtgtttgcgatcattccgctcatagcctgtctcgtaatcagtctgtttgatatgaatattttttttacggacaccagttttgcaggggtacataattttaccatggcgtgtcaggatacgagattctggaatgctctgttaaacacggttgttttcgtcctgtttgaagtaccccttcagatattaattggactgctgacggcgaatgcactggtgaggaccagcctgtttaataaagcagcaagatccattttctttctcccggttgtctgttctatggcggctgtaggtatcatctggtctattctgctagataccaatatcggatttataccgtatgtactggagcagattggaattcataatgttacatttttccgaaatgcgaagacagccatgccgactgtaattgccatgacggtttggaagaatttcggctataccatgtccattctggttgtgggaatacagggaatttcccagagctattatgaggcgtcggagattgacggagctggaaagacggcacagttttttaagattacactgccgcttttaaaacctacattgggattctgtctcattaccaataccatcggttctcttcaggtatttgaccaggtgtacgttacgacacagggcggcccgcagtttaagacagagacgctggtgcagtacatctacaaaactggtttcaaccagccatataatctgggatatgcctgtgctctttctgtacttctgcttgtagtgatactggccatttctctgccaatgtataagaacatgtttattaatcaaaattaggaggccgggaatgaatgagaagaagaaaagacgcgtgacacttttgggtgttgttaagatcttatttacggtatcactgattgtgattgtcctttttcctcttgtatggatggcagtcggatcctttaagatggaaaaagagattttgggatatccaccaactgtttttggaacgaagtatactctgaagtcatttcagagaatttttaagactattccaatggctgcatatattaagaataccgtgatatttgcaggtggttccacgtttttggcggttctgtttgactcattgacgggctatgcgtttgcacggctgaattttaaagggaaagatattctttttatgctggtgctgctgactatgatggtaccgtttcaggttatgatgattccgctgtttctggaatcaaatctgctgggactcctggatacctacggtggactgattcttccgaaggccacctcggcgtttggcatctttatgatgcggtcttattttgcagcacttccaaaggatctggaggaagcggcaagagtagatggtatgagtgaatttggcatatttgctaagattatgtttccgttagtgataccgggtgtgctgactttggccatttttcatctgatgcagaactggaatgatttgctgtatccattaatgatgaccagcagtacgaggatgaggacactttccgcaggacttgccctttttgtgggcgaacatgcgacaacctattatgggccgcagttggccggtgcgttattatcggtgctgccgctgcttgttatttatatcttttttcagaaatattttatcgcaagtgttgcgaccagcggaatgaaggactagaggagagaagaattatgcaaaaagccagaattacgatcaatagagagtttaaaaagggttctgtagatgatcggatctatggaagctttgtagaacatatgggacgggtggtatattccggaatctatgagcctgatcaccctctggctgatgaagatggattccgtaaagatgttctggaggcggtacgaaatgccggcataactaccatccggtatccgggcggcaatttcgtctcctgttataactgggaagatggaattggtccgaaggaggagcgtccgaggaggccggaactggcttggaaggctatcgagacgaatgagtttggaaccgatgaattcatgaaatggtgtgagaaggcaagggtctctcccatgctggccgttaatctgggaacaggcagcatccgggaagctttaaattatctggagtactgcaattttaaggatggcactacatacagcgataagcggaggcgtaacggacgggaagaaccatatcgagtccgtacctggtgcctcggaaatgagatggatggggagtggcagttgggccataaggcggcttctgaatacggaagactggtaagagagacagccaaggctatgaagatcctggatccgggagtggaactggtttcctgcggaagttccttaaatattatgactacatttccggaatgggaggcccggtcgttagatgagacgtatgagtatgtggattacatttcactgcatcagtatttcgacggtcatgaaaagccggtagaaagtttcctggctcaggcggatgagatgagtgactacataaagactgtgacatcagtctgcgattatatcaaggctaaaaaacgatcctccagacagctttatatcagttttgatgaatggggcgtgtggaccagagcgtcaaaggagacagtgagagagtgtgatgagagcccctggcagcaggcgatgccgatcagcgagatggtatacagttttcaggatgctttgctcttcgggggaatgctgctggcaattctaaaacatgcagaccgtgtaaaaattgcatgccagtcccttctgacaaatgtcagcgctatgattatgacggaaaagggaggtgcgatgtggctgcagcccatttactatccatttgcggacactgcagcctacggccatggctatgtcatggactgccgtgtaaccactgctgcgctctctcatgagaagggagagattccgctgctggatacagctgcggtagagaatggagacgaaattgcagtatttatgattaaccgttcttcttcggaagagatggaggtatctctggacttacagggttatgagactgaaacagtactggaacaccgggttctttcttcagacgatccagaggccgtgaattcgccggatcaccagcctgtgagaccggaattgaaggatggcgctgtcatagatggaggaaaagttacagttgtgcttgacaggctgtcatggaatgtgttacgaataaaagttaagtgaatgttgccggagcgtgtggtgcagttccggtataaatgtaaaaaatgaaaccggaggcatgatgcaaaatgggtgttacgacgaatgatatagcgagaatctgtcaggtttcaagaacgaccgtgatccgggctctgaataatcaggggcggatcagcaaagagacgaaagacagaatcgtgaaaaccgctgaagaactggggtaccggccagatcttctggcgagaggactggttaagggaaaaaccatgtatattggtgttgtagtgttcgatgtcaagaaccagtattttgctcagatgttaagcgcaattgaggcggaggcccagacaagaggctactgtgtaaacatcacgctccatggcaagaacagggaaaaagagatagatctaattcgaaaactggtggattaccatgtggatggtctgattctttctccggttaacaagggagaacactttaataattttttaaagagtctggatacaccgcttatcgttatcggaaacaaggtttcggatgagattccatttgttggaatcgatgagcggagggcggcaaaggaagcgacagataagattctggattccggatatgagagggtggtgtttgtctgtccgcctctgggagagtccagggaaggaaacaattatacccacgagcagcgtctggatggttttcgtgaggcaatggctggccggtctgtggaggcggtgattataagttcggaatcttatgagaaagaagcggcttctattctggagacaaatgactgtaacactgcgtttttctgttccggcgatatctatgccatggatattatgaagcatttgaaatcctgtggaaaacaggcgccgagggactatggaatcatggggttcgatgatatcgaacttctggaatatttatctccgcgtttatccactatctataattcagtggaggaagtggcgaaaagggcagtggagcttctgtttgatgaaatggaaggccgtaaaatagccatggaaacctacgaacgctaccgccttgtacagggagagactttgtaaacagagaggataaacatggacaaagatcattatgtgtcaacggaatataacattccgctgattgaaaacagggccgatccgtacatttgtaaacatgaggatggaacgtattattttactgcatcggttcctgaatatgacagaattatactgagaaaagctgatacgatagacggcttaaaaagcgcggcggaaaaaacgctttgggtcaggcacgacagcggtcctatgagctgtcacatatgggcaccggaaattcattacatatccggtgcctggtatatttattttgctgccggagatagggatgatatctggaaaatccgtccttatgtgttgaggaataagggaaatcccatggaagatgaatgggaggaactgggaccaatgaaggcggtggaggaacaggaacctgataagttttcgtttcaggacttttctcttgatatgacggtgttccaataccaggaaaaatggtactgcgtatgggcggagaaggtcaatatcggcaagaagatatcaaatctgtatattgctgagatggagatgccaaaccggctgaaaacggcacaggttctcttgagcgcacctgattacgaatgggaacgccgggggttctgggtgaatgaaggcgctgctgtcttaaagaagaatgacaaactgtttctgacttattctgccagttcaacaggagccgactactgtatggggatgctgagtttacggagaggaggagatccgcttgatccgcaggactggactaaatcaagaaaaccagttgtaaagactgatgtggaaaagggaatctttggtccgggacataattgttttgtaaaatccgaggatggtcttaccgatattatggtattccacgcaagacagtatgacaaaattcagggagatcctctgtatgatgagaaccggcatacctatacacttcctgtggagtgggatgagaacgaggaaccagtgtttcgctttcgtaagaaccggcgccccaatattctgatgatggtagtggatcatcaggcattttatggtcattccagggtgcaaacgccatattttgaccggctggtggaggaaggagtgtcttttgaacggacttactgttcctcgccgctctgtatgccttccagaaaaacgatgatgacgggattgtatcctcaccatcatggccaaacggacaattcctttgaaacaccttgtgacagtcatgaaacgtatgtggatgttctgagggaagcaggataccggaattattacttcggcaaatggcacgcttgtgccggaaagccatcagatctaggctgtcttggggtctcttatccggattattctaatccgtatcatcaaccggagtatgaagagtaccgaaaccggaagaagttaccgccagccaggatgcgtgtggaaatgaatctgtgcgagaagggctggattgacgatgtgaaggagggggatatctatgatttcccacgggaactcacgaatgaggcgctctccggtatcctggccggacccaaagaatgccatgaggcatactacgttgcggatatggcctgccggcaattggaagaactgaagcaggaagaattaaatcgggagaaggaaaaagggagcgggcaggttccgtttatgatgagggttgatttctggggaccacaccagccatactgcccgacagaagaatttgcagcgctctatccaccggaatccatagaagaatatcccagctttgctgatgatctggctggaaaaccggaatcctacttgttcgatacaggaagggaaacgagccgggaaaggcagctgattcgcccaaatcccatggaatggtcccgatggcagaaaatcctttccaggtgctacggtcagattaccatggttgacgaggctgcaggacgtgtgatcgagaagctgcgggagcttcatctggatgagaatactttgattatctggacagcagatcatggtgacgcgttggcctgtcatggcggtcattttgataaggctttttatttgccggaggaggtgctgcggattcctcttgcgatggcctatcctggagtactgcccaagaatcgggtatgcaggaaactgatcactaattgtgatttggcgcctacaattgtgagtgcggcaggaggcagtttccatttacctgtagatggagatgacatattaaggctgtttacagagcagaaaccgtgctggagaacagctgtgctggccgagacttatggtcatctggcgcagtggagagcggaagccgttgtttggcagcaatataaatatgtggataatcatgaggatatggaggaactttacgatctggaggctgacccgtatgaactccataatttggctttggacgaagaatatcaggtgctgcttatgaagatgcgtatgaagcggctggaactgaagccggagtaattgaaactcgtaattaaatgccggaaatggccgaagagtcatttccggcattttacagttcattctaaaatttgagaagtctgtttacacgccgaataatccagtgtataattaaaaaaatgctcttacgattgtaataacagggcgtttatacataattgaggggattaaggaatgaaacattttttgaaaaaaatactctgctggacactgatcagcaactgttttcttatgacagcgtacgcagcgccggcgtggcctgcgggaccggatatacaggcggaggcgggagttgtcatcgatatggattcaggtgccattttaggaggtaaggcgtacgatacaccgtatccgccggccagcattaccaagcttctgacggctcttctggtcctggagcacagcaaactcgacgagatggtgacattttcaaacagtgcggtttataatgtggagtctgacagcggcaataagctgaatgtggcggagggggatcagttatccgtggaggactgtctctactctctgttggttcattcctgtaatcaggcggccaacgcgctggcggagcatgtggcgggttcacaggaagcgtttgtgaaaatgatgaatgacaaggcggcagcgctgggctgtaaggacagccattttgacaatccctccggtctcaacggagatacacagtatgtaacagccagagatatggcggcgatttccagagcggcgtttgcggaaccggatattatcagaatcagcgcagcgttaaaacacacgtttccgcctacgatcaataatccggaaggtctgacaatttatgcggaaaataagctgattctgaacacaaatgattcttcgagccagtactactatccccctgtaaagggaggtaagactggttatctcttaaaagcaggcaacacgctggttacctatgcggagaaggacgggaaacggctgatttccgttattttaaaagggagcccgggccagtattatctggacggtaaagcgcttctggaattcggatttgaacattttaccaattacaatgtggcggagaatgagtctgcctacacggaaggggaagccgcggtggacgtaggcggaaaaagctatcttccgactgatttggagatcgatccggcaggcgcggtgacacttcctgaaggggcggcatttacggatttagagcatacactggtgaccgattacccggacgagcatccggaaagaagcgtggcattcatccagtatacctatgacggacgaaaagcagggggcgcctatttaacacagaaagaagtgcaggaaccggttacagaaccggcatcacaggaagagacacagcccgaaacagatgataagaaagagaataggaagaagggattttccattaacccctttctgatcatcgcattggtggtgatcgcagccgctgccgggggaggagcatatatatcctattcccgcaaaaaagaggagcagcagcgcgcgctccgcagggaacagagacgcaggaggctccgggaagagggcgtgacggaagaggagttcgaccgtttgctgaaagaacgtctgggagaccgtagtaaagggaaaaatcaaaagaaaaaataaaaaaccgatatagaagtgaatcagtaaaaaagtataaaaagacaggctgtactgcttatcccgggaatgggaggcggtacagcctgttttgatatttcggttttaaccgcttatccaggtttcagccgtctattccggattatgctgacgatttccggctgcctgaattatatagttgccggtaaaggcgagccctgccagaaccagagcggttccaagaccggagtaaaagactgcaataaatatgtcaggacagagaccggaggtgcgcaggccgatgccaaaggtcatcataaatgccatgatgatgaaggatttgcggtcaaagaattttaggataaactgcatctcttcctcgtaacggacaatccggtcggtgtgcctgcggaccagtttcccgaaaaccatgaaccagaaaaggaaaaatactgctgcggaaagagccagatgaaacagtgtcacatagcttttataagaaataatcccaatacgcagaatattaaagccggctgtgagccagacgatgcctgcaagcagcagtagataattttttttgattttcatgtgagtacctccttaagtgaacaatgttcattataagacggttctgacgatctgtcaagtgatgggaaaaattatttggaatctttcggatcatttttttagagcagatatgcggctgctgtatcaagtgtgaggataatcagaggaatgttacatttttcttaacaatagaatcgttgtattgactttaaatcctacatgtgtaataatttataaaaactcagcgaaaaacatgagggctgcacgattgatgccccgttacctgcggattttttgactgagaccagaggttagacgtcggaatcgtgaaacaatgtaagaatgaaactgtaaagagaggaaccgtattatgaggcatagaagaagcaaacgtggactgatcgtcggtgggattgctgcagggattctgattgcggcagcgattgtaattgggattttgtggtttcagaagagagaggagacggagaaggaaaagactccggaggagctcttaatggagtatacggaatatatcaggaccggcaattacgaggccatgtatggaatgctgaatgaacagagccggaagaatatcagtctggaggattttacagcgagaaataaaaatatctatgaaggaatcggcacttccggtctccaggtggagatccagagtgtagaggaacggaccgaagggctaaagacggtcagctatcagacttcgcttaacagttccgccggagagattcattttctcaatcaggtggattttatccgggagcagccgtctgagaatcaggagacgaaaaggaaaaaggatgcgggagaatatcggctgatctggaacgatcaggttatctttccgaatctggggcgtaccgataaagtgcgtgtttctacagataaggcggtgagaggagaggtgctggaccggaacggcggtctgctggcggggaaaggcagtgcttctctggtaggtctcgtgccgggaaaaatggccggttattctgccggagcggccggagcggctggagaggaagccggtgctaaccctgatttagagaagctttctgaacttcttggtgtctcggtggagagtatagaaaagaaactggcggcgaagtgggtgaaggaagattccctcgttccggtcaaaacgctgaagaaggtagatgaatttgatcttcagtcagcgaatccaaagcaggataacctggaaaataaggcgcttcaggacgagctcctttccataccgggcgtgatgattaccgatactccggtgagatcctatccgctgggcgaggcggcggctcatctggtagggtatgtccagaatgtgacggctgaggacttggagaagcatccgggcgagggatatttatcagacagcgtcataggaagaagcggaatcgaaacactgtatgaaaaagaactgaagggacagaatggagagaagatctcgatcgtcacctccgagggagaagaaaagctggttctggctgccatacctcgggtggatggcagcaacattactctgaccatagacagcagccttcagagaaccatctatgagaagtttggagatgttaagagctgtacggtcgccatgaatccttatacaggggaagtcctggcgctggtgaatacgccctcctatgacgacaacgatttcatactcggtatgtccgaggaaaagtgggcctccttaaatgaagatgagagaaagccgatgtttaaccggttccgccagcgttttgcccctggttcttcgtttaaaccgatcacaggtgtcatcgggctttccacgggggcgctgactccggatgaaagttttggcacggatcatgcgggacttagctggcagaaggacgccagctggggaaagtatcaggtgacgacacttcacgattacagcccggttaatctggaaaatgcttatatttactctgataacatctacttcgcaaaggcggcactgaagattggctacgatgattttatggccggactggaccgtctggggttcaatcaggatctgccttttgagatatcggtcgctcagtcccagtattccaatacggaacgaattgagacggagatccagctggcggacagcggatacggccaggggcaggtgctgatgaatccgattcacttagcggcgctttataccatgttccctaacggtggagacgtcataaagccgtatctcacataccagaaggagagggaaccggaggtatggctgaaaggagcctgtactcaaaagactgcggagacgatagagactgcactgaagaaggtagtcagttcggaacacggaaccggccacgccgcgatgcgaaatgatatcacgctggccggcaagacgggaactgccgagattaaagcatcgaaaggagatacgtccggtacagagcttggctggtttgccgtgtacacggctgacggtccggatcacactccgattcttatggtcagtatggtagaggatgtcaagaatgccggaggcagcggacttgtggtgagaaagacgaaagccgtgctggatacctatattcctccggtgcagtagaataaaaatgtcatcagacaaaacacgttgctgctgtctgatgacattttttgatgtaacaggaaagggcatctgctgaagcagatgcgctccggcgtgggagtccggctcactgtactctttcttctgtatgggcaattgttcggcggttcagttaattccccccatacagttttttcgccttcagaatatccagtgcgatttctcccgctttggcaccggtcgccccgtcttctccgctgatatggaccgcaaaggaataaggaccgtgaacagattccacgaagccgatgaaccagccgttcgtattcttgccgtctacggtgccggtgcctgtttttccataaagcgacgacgtgccgtcggaggagagaaagagagcattctgaaccgtttccatgccgttgtctgagaagggcagtgtatgtccggataagccggccagcagcttcacctgttccaacggagatatttttaaggaggactccagccagaaacgggaaggccctcctgaaaagtccatatttccataggaaagactggtgagaacctgtcgggtggagtcccatccgcggcggtggtccagatccataaaataccagttgacagaatttgccatggctgagttcaggttctggtctctgttccaggattcgaaaggataagtttctccattccagtccatggcagagtctgtccctgtgataatgcctgcgtcgagggccatcagggcgctgtagatcttgtaggtagagttcggggatacccgcgtgcgtgcgtcctcctcgttggatataaggtatcggttttctgaagcgtcatacaggacgaaactgccgtcaagctgtccaaaatattcacttaaatcttcctgatccgtccggggcagcgcttcggtgtaacggtctgaggcacaggcgagggcggagacggacggcgtggtacagagaaccagcgcggcggtgaggagatacagcatacggctctttatccgtttacctccggattcccggcggtatgaggcaatgaatgaaatccgtttgcgtatctcttttctgctgccgccgatgcctgctgtctgcccgaaggtcagatgggagaggcgcgccgcaaaatgaagcagggcggttccgtaatcgacggaggcattttccccgagaagcgacaaaactgctgtgtcgcaggcgatttccctgtcgcttaccatctccttcagggccagccagaccatgggatggaaccagtaaaaaatcaggagaatacggaaaaaagcgccgcatatcagatccttatgcttataatgatgaagctcgtggagcagaatacagcgtatctcgttttctgacagaccggagagctgggaatcgggaagcagcacacatggggctgcagtccccgccgtaaccggagagtgaagcaggggagaaaaacgcaggggaatcttccttcggattcccagctgcctgatgcagtctgcatatagattccgcagcacatcgtcctgaacgggaagcgaggtcctttttaaatgatttacacggattgcggaaatcagagtaagaactgtgaggatgactgttcctccaccccacaggcagataagagcggctgcccaaaaaccaggtatctcccggcttacggaaatggaaaaatcgttcagtattcctgatgccgtgaaattgtttccggcagtgcccaaagcgccggtctgtcccggatccccggcagcggggaatcgtaaaccaatcagccggtcagccagcctggcggcccctggaaatgccgctgccaggaaaggcgctgcggccagaaacaggagaagaaaccataatcggtaacggatttccgccgttaggtgccgataaaatacgtttcgaataaaaagaatgataccgccggaaactgcgatggcggcactgctttgcagcagataaagaagcagagattctgccatctacggttctccttccccgtcatgtaataacaggctgcggagttcctccagctcttcctgggaaatccgctcgtccttcatataatttgccaccagtgaggtcagattgccattaaagaagcgtttgagaaaatgctcgctttcctggttaagatagtcttccttaacgaccagtggggtgtatacaaagacccggcttttcttttcgtatgtaatggctcctttttgtacgaggcgttttaacagagtctggatcgtcttgggactccagtcagtggcctgtaaaaggatgtccgtcacctcgttagtatttatgggagctttgctccagattaccttcataacttcatattcggcttctgatatctgcggcagcctgctcatgataccctccctgttcttacaactgtaatacaaatattatacgtgagcaaaaggcggatgtaaagggggtggaattaaattttcagcagagttttctcatttgacggatccggcaggaccatgatatactagggacagtcagtgagtgaaaaacaggggcggctgtttcgcggcatggtcccggccggtgatgtccggcgaattatactagatgtgcgaggtaagacaacatggtccaaaacaggggaattaaccaggacgtgacacaggagatgaaccgttctctccttttgaaaaacttaagaagagaaggtatgtgttccagggcgtatctggcctccttaacagggctgaaacaggcgaccgtgaccaatattatgaaggatttcctaaactgggggatcgttacggaggtaggcttcttaaacggaagcaagggccgccgttcgatcggcgtatccatcagtcaggatcgttaccgggtcatcggcgtgcgccttgcgagaaaacattacagcgtcggcctgttcgatttgacagggacacagatcacgaagaagcgggtggattttaatccggaagagcagccggatgcggaagatatcctgaatcagattgcggcagagatgcgcgccctgatgaagaaatatggaaaagataccatactggcggccggtatggctgtgccaggaccatttatagccaagaaaaacaggattgctctgattacgggagctgatatctggaaagacgtggatttaaagaaattctttgaccgggaactggatatccctgtatttctggagcacaacgccaatgcgggcgcttacgcccatatgtgggatttaaaggacgcctaccgcgatgacattctggtctatatcgccgccggtcagggcattggcgccggaattgtgatggatggaaagatctataagggcgccctggggacctccggtgagattggccatatgaccattgaccggaacggtcggccgtgcgcctgtggcaataaaggctgtctggagcggtatgcctcctctctggaactggtgaaggccgtatacggtgatcaggccggccggtcagggtgcaattttgaagatgtagaacggcggattcgtgagggtgataatttttgcatcgactgctatcggcgtgcctgcgagagtcttggaattggaattatcaatattgtcaatgtgattaatccggacatcatcatcatcggtgacgatatggcgaggccggatccggaactgatggagtctgtggtgcgtgaaactgtgcgggaaggcgttctggacgacgtgtgggagggactcacgctgtccatcagcacctaccagggcgatccgatcctgacgggagcggcgatagtagccattgaccggattttcgacagtccgggtcagtttattaaagagagtgaagattgagagtaaaggaagaacgctgtccagccgggtgggagataactgccggcaggacagcgttttcatatctttgttctgaaagtctacggagcgtggattgttcccgtagactttatcaggtacaatagagtccgaggtgataaagatgaatacagaacgtaaaaaacagctgatcatggaatacaaaaaccgccatccggagatgggtgtaatctctcttaagtgcaaagctacgggtgaggcgtttctgggaatatcgggagatacgagaacggcatttaacagtgtctgtgccagattatcaggctcgtcccatccgaaccggcatttgcaggaactgtggaatgagtatggggaggagggattcgagcagacggttatgagggttttaaagtatgaggatccgggtgaggatcatacagaagaactggagctgcttcgggaggagtgcctggaggaagatgagagagctgtgaagatctggaaatgagagggaaaaagaatggattgtgcaaaagtaggccggttaattctgcagtttcgaaaagaaaaaggactgacgcagcagcaggttgcagaccttttgggaatcagcaataagaccgtatccaaatgggaacgcggtttaggatgccctgacgtatcgttgtgggaaggactttccacggtgctgggcgccgatattataaaactgcttcagggagaactcactccaaaccagccggatgtggggaaacttgaaaaggcatgcttttacgtgtgtcccgtctgcggcaacattcttgtgagcacgggaaatgcgtcaatttcctgctgcggaagaaagttaaaaccgctgattccggttccgtgctcagaagaacataagcctgtgatccgggaaatggatctggaatacttcgtgacgctggatcacgatatgagcaaggagcattatattgcctttgcagcctgcgtgaatcacgaccggatttacttaaacaggctatatccggaacagaacccggaattccgcatgcccatgataaggcggggcggatatttgtatttgtactgtacgaagcatggactgcagaaatatccgttttagccggcgcaggaacccggcagcaggcttagacaacacgccccatacccttccccaataatacggaagttatggggcgtgttgttattgtccgggccgctgcatatttttataaattacctgttgacattttccagaaatgtggtattgtttaactagaaatattaattaattgaattaatacataaaacgaaggaacaaattaattcaaaaataaaaaagaagaggagaacagcgatgaaattttttgtggacacagcgaaggtggaggatatcagaaaggcaaatgatatgggggttatctgtggagtaaccacgaacccgtccctgattgcaaaagaaggaagagactttaacgaagtaatcagagagattgcttctatcgtagacggaccgatcagcggagaagtaaaggctactacgacagatgcggaaggcatgattagagaaggacgcgagattgcagcgattcatccaaacatggtagtcaagattccgatgacagtggaaggcttaaaggctgtcaaagtattaacggcagaaggcattaagacgaacgtaacgcttgttttcagtgcaaaccaggcacttctggctgccagagccggggccacttatgtatctccgttcttaggacgtcttgatgatatttccatgccgggcatcgatttaattgaaacgattgctgagatgttccgtgtggcgggaattaccacagagattattgcagcaagtgtccgcaatccgatccatgtcatcgactgcgctcttgctggagcagatatcgcaaccgttccttacagcgtgattgagcagatgacaaagcatccgctgaccgatcagggaatcgcaaaattccaggctgactataaggcagtattcggagagtagaagaggaggatacgggattgagcgattatctggaacttgaaaaaatagcggttgagatccgaaaaggcatcgtgacggcggttcacagcgcgaagtccggccatccgggcggatcactgtcggcggctgacttatttacctggctctattataaagaactgaacattgatccggaacagcctttgaaggaggatcgtgaccgttttgtattatcaaagggccatgtggctccgggatactattctacactggcgaatcgcggtttcttccctgtagaggatttaaagacactgcgtcataccggctcctatttacaggggcatccggacagaaagcatatcccgggcgtggatatgtccagcggttctctgggacaggggatttccgctgctgtcggaatggcactctctgcgaagctgcagaagaaggattaccgtgtttatacgctccttggcgacggggagattgaagaaggtcaggtctgggaagctgcgatgttcgcaggctacagaaaactggataatctggtcgtgatcgtggataataacggactccagattgacggtccggtggatgaagtctgttccccttatccgatcgataagaaatttgaggcatttaatttccatgtcatctgcattgacggccatgacttcagccagattgaacaggcatttgcagaggcgagaaatacgaagggaatgccgaccgccattatcgcaaaaaccataaagggcaagggagtttcctttatggagggagcggtggcctggcacggtgctgctccaaacgacgagcagtatcagaccgcaatggcagatttggagaaagcaggtgaagcgttatgccagagatgaaagaacaatccgtaaagaagatcgctacgagagaaagctatggcagcgctcttgcggaactgggaagcgtaaatgacaaaattgtggtcctggatgccgatctggcagctgcgacaaagacgggagttttcaagaaggtatttccggaacgccacatcgactgtggtatcgcggaatgcaatatgatggggattgccgccggtcttgccgcaacagggatggttccgtttgcaagtacttttgcaatgttcgcagccggcagagcatttgaacaggttagaaactccatcggatatccgcatttaaatgtaaagattggcgctactcacgctggtatttccgtcggtgaggatggcgcaacccatcagtgcaacgaggatattgctctgatgagaacgattcccggtatggttgtgatctgtccttccgatgatgtggaggcgagagccgctgtcaaggccgcggccgagtatgagggcccggtatatttacgatttggacgtctggctgtgcctgtaatcaacgacaatccggagtacgagtttcagatcggaaaaggcgtggttttaaaagaggggaaagacttaactgttgttgcaacaggtctggaagtcggtcatgcactggaagcggcaaagcttctggctgaagacggaattgatgctgaagtgatcaacattcatacgatcaaacccctggatgaggagctcattataaaatctgcgaagaaaaccggaagggtagtgactgtggaagaacactccgtcattggcggactgggaagcgctgtctgcgacgctctgtccgagaacgctccggttccggtctataagatcggcgtacgtgatgtattcggcgagtctggtccggctgctgagctgattcataagtatgaactggatgcagaaggtatttataagcagattaagaataagtggtattgagacaggacagaagcgaagaagcagtatgggattcgcagtctgaagtgaaatgtacagcaggccgtgatacgggaagatgtgattcctgtatcgcggcctttttgcgtggaaaaaaatgatgatttacgtggaaagatgatgatatcgcgtaagtgttccgggagaaaaagggaagctccgtgcagagagaacgtttattcccgtgagcgtcgggaattttaactgatttgtaagaaaaacgtttgaaagtgtggttgaaataacggagggaagatgctataatctaagtggtaagtgataagtagtaagtagcaagtaataaacaaacagccaggcattattttttctgcaggaacagcaggcaaacaccaaatcgcacgagtagaaaggagattactatgaaagaatatacattatctcagcaatatgccctgattggcctggatggccaggattccatacatgcaaccgcggcaaagaatgcggtctgccgctgtatcgcggcggcaaagcttctggaaaggcttgtattaaccgaagatccggggtcagaggctgtgaaggaggaactggaagctggttttaaggagattcgcagtataggcaagaaagaagcccgagctctggagactgaggttgcagagacgctgaaggcagagggggtccttgatgaggttccggatattatggcatgtgacattaattataacagcatgaatatggaactgaaagtctaccgcagcgacgaggtggaataccagcgtacagcggagggagttcgcgctgaaatgctcgagggaggtgccgtaacgttagagtgtgcctgtctggtatggctgtttcgtgagagcggttgtatccacgagatattttctgtgaatgagcaggaggaactggctgcccgcatgattgagctggccgagcaggaaccggttatcagagtgatctgggatctggagatttaccggtggacggagaaactgtcacagcagctgctgggggcgaagaaaaatctatttaagaatccatatatggagggcgtcaatctcctgttcccgtttctggacagaaggcaggcgatattcattgacttcgttattttcggaacggacgtggcgggaaggcgtatggctattctgaactatttaacggaaaagggtcattacgtggaagaggtcaagaatggttctgagacccttttaaaggtagataactattattaccgggtattccccatgacaaaggtttactataaggtaccggttcagggagcgaatctggttcctgtttataagtaggtgatggaatgtcaagacagagaagcatggagaagatcagtacctccgaatatgtatcgattggagaactggccaggcttactggctgccgttacagcactctgaagtattatacagaagaaggaatgcttccgtttgaacaggaagaagagaatctcacgagacgataccggagggtcgagactgtagaacggatagagcggattaaaagtttaaaagaaagcggaaagacgataccggagattaaagaactggtcaagacgggataatcccgcatgcgtagagcccatccatgagcatgcgggatttcctgggaggaaaagtcaaagatccggccgcaggagacaggacgttaaaactatagtgccgcgggcggcgggatctctgcccctcgcggcagtcccggctggttccatgagtgcgccccaccggctgactgtccgcgggaattagcagaaacaccaaaattgtgtacagcagcacgaagccggaaagttaagaaaaatattattgacattttgatgattccgttttatagtatccatagaataaagaggacgtatggtcctttatgagaagaggagtgattgttatgttggcaaacgataggaaatgggtgaaaacaagataacaacaggaaagacagggactggcgtaagacagctttatttactgcgcacggcttgttgtcgtgtttttttgtacctttttttcggaattccgggaaatggcggtacgtccctgtcggctcataaaggagattttgatttggagagagaaaattgcatattgatcagtaacagtaaaaactggattgaacaggcggctgtcgatcagcttcgtggcgttgccaagttacccggagtggtgaaggcagtaggcctgccggatctccatccgggaaagacaccggtaggaatggcggtgttgagcagagaacggttttatcctcatttgatcggcaatgatattggatgcggaatgagtttattttccacaggagtaaagcagaagaagtttaagatggagaaatgggagacgagattaaactcgattcgggagctgggggatatcccgtgtgacaatccttatgagggattttgccctgttaaggatttgggaacgattggcaccggaaatcattttgccgagtttcagtgtctggaacacgtttacagggaagaggaggctgagcgtcttggactgctggagggccgcatcatgttattggttcacagcggctcccggggatacgggcaggagattttaaaccggttttattcgccggaaggactgccggaagatggagaggagggcagccgctatctggcggaacacgattctgctatcctgtgggccggaaggaatcgcatggtaacggcgaaaaagctgctcgcttatctgggcgtggagagtgaggtgaatcctctgttagagagctgccataattatctggagcgaacggaagagggctggcttcaccggaaagggagcgtatcgacgaagcggggagccgtggtgatacctggatccaggggaagtttaagctatgtgtgtgtaccggctgcggatacagccgtgtccctggactctgtgtcccatggtgcaggcagaaaatgggcccgaagtatctgtaagagcagaatcgaccggagatacgacagggattccatcaggagcacaaagcttaagagccgcgtggtctgccatgacaccaatttactgtttgccgaggcgccggaggcctataagaacgtggaacaggtgattgcttcccttgaggactatggactgattgatgttgttgcgacactgcggccgcttctcacgtttaaagggtagggaggcgcgcatgagaatacagataagttccgggcagggcccggcggaatgcgagctggcggttggtctgctctatgaggaactgaaaagggaagcgtcggatatccggctgctttctttcacacagggaaaaaagcgggagggattttcctccatcatgtttgagacggaacatgattttaccagcctggaaggcagtgtgctgtggatttgcaaaagcccttaccggccggaacataaacgaaaaaactggtatgtggatgtcagtattttggagacggtgccgcgggtgaccgaggaaaagctggttcgctttgagacctttaaaagcggcgggaaaggcggccagaacgtgaataaggtggaaaccggagtccgcgccattcatataccgacggggactgcggtggtatccacagaggcgcggagccagcatatgaataagcaggctgccttaaaccgcctgtgcgaaattctggcggagatgaacctggaaagcgggcgaagggaaaagaacctggcctggatggaacacaccaggctggaacgggggaatcctgttcggatctatgaaggaagagcgtttcaccttaagagggggaacggtggggataagaccaatggagcataaggtaaaagggcagaagatttttcataccggctatgagccgcgggaggtagataagcatgatatgaaaaatattgagaaactgatgagcggcgtctcacagagcggatttatgcatgagtacaaaggataataaaacagcagggaacaacgattttgatcgtcgctccctgctgttttattatgactctagtgcccccaaaggttctgtgccacctgcatagcggatttatctgcgatttccgcgatcttttctttggactctttcatgccattgttgatccagcagcgcaggactccggttaaaccgaatgtgatgaactcaatgaaataggaaagcgatacgtcgtcgattcccggatactgtttcttaaaaatcgcggttccattgtcagaaatgagctgatggaaacggtagacaaaatcactggatgcgctgttttcaaacaaaattctggcaattttaacattttcttcaatatattgtatgactggcagcaggatgggcatcagcgaaccgttcttagaactgcacaggaaattgtcgatcatgtcctgaaaatcggccagtacgtcggattccatcttctgcagcagatcgtaagtatcggtgtaatgattgtagaaggttcccctgtttagatccgcccgctccgtgatgtccttgacggaaatatttttaaaatctctctcggtcatcagctcaatcaggctgtcttttaacattttctgggtcctgcgaattctccggtcctctttctgtgattccatatttttctcctcacaatcctgtttaaaaacaaatttatcagtttcgattgatattaaacacaaaagcgaataagtggtgcttatcacacaaagcagcgaatcgttgcttattgaaatatatcaacaattgaattataatacacatgtgttcaaaagtcaatgattgtacaataatcaaaaggtgggcaataatgaaaagaaacagcgatattttcaatcaggtgattcgttttattgtgtatcacgggaagatcattgagaagattttcctggtaaccacaattctctgcgccgtttgtttcccgtttgtgggggtgaattacgatctgagcaaatacctgccggattttgcaccgacaaagcaggcgctggatgtgatggaagcggagtttggttatcccggcatggcgcgtgttatggtaaaagacgtatctctgcaggaggcgaaacgcatccgggaagagatatctgcggttgacggggtagatctggttctcggttctgacgtctcgaccgatgtctacatgggaacaccgtttctgagtgaaagcatgacggaattcatcggcgtcgatttgcttgcaatcgacgattactataaagacgggaacgccctgatggacattgtctttgaagataaagacggggagccgcgtaccaatgcggccatcgaggaaatttaccggatcgtcggtaaggaccggggctgcttttccggaagcgccatatccagcaaggaacgggaggcttcgattacaagagagatcgccatggcgattgccatgtcaatcgtgattatatggctgatcctgacgctgaccaccacgtcgtggatggagccgtttctctttattttcgtgatgatcgtggcgattgtactgaatatggggtcgaatattatttttggaacgatatccttctttactttctccacagcggctattttgcagctggcggtatcgatggactattctattttcctgcttcatacctttacggcattgaaaaacaggggcatggaaatccatgaggcgatggtggaggcgatcagggaatcctgcagttcgattctcgccagcggggcgaccaccattgtgggatttatcgttatcgcgtttatgcggtttaccataggaaaggacgtaggatttgtactcgcaaagggaatcatatgcagccttttaacggtgcttctgctgatgcccacactgattctccggtttgacgataagattgtgaaaacggcgcataagccgcttatcgcttcttttgatggatttgcacgggccatgtaccggatcaggattccggtgttccttttggcggcgctcttagcagtgccctgttatttcgggcagggtatgaatcacttcctgtacggcgacgatgcgatcggtgcgggaccgggaacgcgggtttacgaagacacgcaggagattgaccgcctgtttaaaaagtccaacatgacgatctgcatcgtgccgaacggttccggcgtgacggaaaaggaactgtcaaaggaactggagaacctggattttgtcaattatgtgatttccatgtcaggaaccatgcctgacggaataccggaaagcttccttcctgatgatttgacgagccagctgcggggcgatgtttatgccagaatgctgatttccatgaataccttacaggagagcgactatgcgtttgagtgcagtgccagactggaggagattgtacataagtattatcctgacaattcctacgtgatcgggatgacgcccacaaccattgacatcagggatattctgacagaggattacaatcatgtatctctgctgtctctggctggtgtggcacttgtcgtatttctgacattccgctcggtcctggtgccgattctggtgattgtgccgatcgaagttgccatctatttaaacatgacgctgccctatgtgatgggggacaccatgatctatatcggctatatcatcgtcagctgtctgcagctgggggctaccatcgattactcgattctgatgacaaacaactacctggcgtttcgaaaggaaaagggacgccgcgaggctgccgttgccgctgtcaataagagtacgctttcaatcatgacatcgggcggtattctgatggtggtaggttatctgctgtattttacttcgtccatacaggcgatttcccaggtgggacgtctggtgggacgcggggctttcctgagcgtgacactggtactgtctctgcttccggcgctcttatccgcatttgataagcagatcaaacggcagcaggagcgggcggatgcacggaaagagagaaggcggaaccgtctggcggcagcaaaaaacctgacaacagggaaaagtctgccgggagcgaagcgtgtgacggaagagaaggaactgccggaagagaaggagttatcggaagagaaggagttaccggaagaggcaggtcttacgacagatgtgagcccgatatttgcagatggaaaatgcgggcagaaagaaggctccgcgcaggcggaggcagaagaggcggagcagaaggaaaagggagatgacagccatgagaaagagtaaacggatttcagcgtttgttttagcagccgtgcttgcgtgcggtccgtccatggaggcgggagcggcggcagacactccggtctgtgatgaaacgctctatatcacgatggatccctacggggagattaaggagagcagtgtcgtaaaaagctacacgatgaacggaagcagccggattgttgattatggaacgtacaaccggattaccaatatgacggatcactccgatcctgtgacggagcaggacggaaagcttacatttaatttggaaaatccggaggaccgtttctattttgaaggcggtacggagaccacaaaggaagaacttccctggaatattttagtgagttaccgcttaaacgggctggaaaagaaggcggaagaactctgcggcgcagccggactggtggaagtgaatgtagatctgacgccgaataaaggtgtgtcggattattaccgcaataacatggttctgatggccggaaccgttgtagacatggataagaatttaagcctcgaagcggaaggggctcaggttcaggcaatgggcaatttaaatgcggttatatttttcgcactgccgggggaagagcagcattattcgattcggatcggtacagatgatttctctttcagtggagttgtttttaccatggtgccgctgactgcgtcccagcttgacaaggtgggagatttgcgtgaggcgaagacgaccctggaggattccgcggatgccatcagtgacagtctggacacactgtttgatacgtttgatggcatgcagaaaagtgtggaagattcagctgacggtctcaggggactcgatcacagccgtcagctgttcgcagattccaagggaaaggtgtacgccgatgcagacgaagcgctggcaggtttaaatgagctgtcccggcagtttgaaccgttctccggacatatgagggaggcggaaaagtatctcgataccatgaattcccatgtcaatgaactgactgggcatctcgatgatctgtcgccggatctggaggacatgaaggcgaccatgcgggatcttcgggatgatttacgggggatcagctccatgctaaacagtccacaggtggatttaggagcccaggcgtttttacagctgatggaaaagacgaaaacggatctggagatctttaagcagtcgcaggccaaactggatggcggcgtgagtgcgctggcaccggctcttgcggggctgcttgcacaggtcggaggactgggtggaaaaaaagcggaatatttcagtgaagacagtctggaagattttatcgatgagatggagagtgcgggtgtggatctgggagatgaggatgaggtggcttcctatctgcgcaatgagctggggatggctgcggatgaaatcgacgcactcatgagatacgcttctcaggctctgtatgagactgccacagcgtcccagccagacactggaaatatcgccgccgcagcccgggcgatcgttgaaggcttccatggtaccgccggcaacaccggactgattacagatatacagaccatgatcggacagacggaagttcttcttaaggccgcagcctcccagaaagggaacgcggtgggtatgctgcagaataccgcggacatggcccatctggcagccagtatgtgcaacacactggacgatattatttccgatgcagacagtctgactaagacggtcaattattatcacgagggtacgctggagactctgcgtgatctgggaagtatgacagataccgcagccggaagtttaaaatctctgaccgtgttctgtacttcctttgaaaatcagctgaaaacagtcggcgattccttaaactccagtactcagaagacattaaacggccttgcaggaacgctggatggattgggaaacggactggatcagacggatgtgcttaaaaatgccaaagacaccatcaaaacggtgattgacgataaatgggatgagtataccacaaaggatacgaccatcttaaatattaatatggacgcgaagcccgtatcgctgacatcggataagaacccgtctccgcgtacggtacagattattctgaggaccggtgagatcagggaaaaagataaaagtaacgctgccgaggtggatgaaagttaccacccggagggaaatgtattccaccggatcgccagtatctttacccggatctggaagatgattacatcgctgtttcaaaaataaagagttgtaaagcatagaaaattgtgaaaaaggttccggattgctgcaggggccttttttgcgttttaaggtaagaggaaagcgctcctgtcacacaggaatctgatgacaggatattgtattttacaggaaaacatggcatactaccggtaaaacagtggaaaagaacaggagaatgatatgtgcggacgatattatgtagacgatgagacggcgcgggagatcgaaaaattagtggaaacagtcaatgacaagcttcgtctggaacggctgggcagggatatccatcccacggatgaggcgccggtcctggctgccggaaaccacgaaatgaaactggaatggcagcactggggcttcccgggatttcagggaaagggggtaatctttaatgccaggtctgagacggtgctggaaaagaagatgtttcgtgagagtgtcctgcatcgaagaatcatcattccctgtacctggttttatgagtggaaccggaaaaaggagagggtgacattttacagggaagacgcaccggtaatctttctggctggtttttataatgtatttggagacgaaaaacgcttcacggttttgacgacggaagcaaatcagtcgatggtcagcacccatgaccggatgcctcttatcattgagcatgatcagattaaagactgggtgatggatgatacgaagttcagcggaatgctgaagcagacgccggtgctgctggagacgaaacaggaatacagccagcaggaactgaaatttttatagtaattactccccttcagtagttccttctgcgatcagttagcaaacgatttttcagagaattgtaaagaaacagaaatagataatctgttgaaaatatgataggatagtaatatctgaaatatgacagtgatccgagacgggaggaatggagtatgtggacaagagcagagttaaaggacagggcaaagaatgacctcaggccgtattactggtatggcgttctggtgtgcttcatcgccggaatactgggggcaggaagctccggcggaggcgtgagtatcagcacaggcagcagggcgagcgagaattcatattctatcggcagtatccgggatggacgccatgccgcggtttttttgttgattttagggatttttctggtagttttcatcattgccgttgcagtcggtatttttgtaagcaacgttgtagcagtaggtaaactgcgctattttatggacagcgcagttatgcagcagtcagccggaatcggccgtattttcttcgcgtttggcggaggaaactatttaaacgttgtaaagaccatgtttttaaaggggctctttgaagggctgtggtcgttgctgcttgtaatccccggcatttataagcactatgagtattatatgattccttatctgctggcggataatccggagatggacaggcacgaagcattccgcctcagcaaagagatgatggacggcaacaagtttaatacctttgtactggaactgtcctttatcggctggtatttgctgggaatactgctttgctgtatcggcggcatctttgttaatccgtactatgaaatgacctttgtggagctttactgggttttgcgtgatcaggtgatgggaccgcggccaacagaagccatggatcagaatgtatatgctgacgcgtactaccgggaaatataatggaataatgggttatcagttataacggattcaatctgtttcgaaagaggcggggaggtagaaaataccttacccgtctctttcgtcctgtcagacggattttcatctgataataaaagccatccgcctgtgccggtttgtgaaagggagataataaaaagcatccggcttagttcggatgcttaaaattaaattcaatttgattatagtctgccggatcagatacaaaagctttccctatcgatagtttttcgttgatttctctctgggttacgtaatattcattcctggccttcattagaatagaggcacgtgaatcctgagatgagttttgaaaccagtagagtaacagggattcttcttcggataataacttttcaactacagttccggcttcttcgggtctcaatgcagtaatgagaggttggttaagttctggtaaatcaaagagattgtagatcgttgttcccagtgcttttgctatgttctccatgtaagcggtttttacattaatgacggttccattgatgatacggttcagagtggtagccgggatacctgttaaagcagacagctgtgttttattaatatcctttagcttcatatacattaatatcttattgtttaccatttgtacaaccctccaacaagaattatagcagaaatggaaaaaaatgtaaataaatgtcgaatgaaaaaggacagagagaattttgatattttgttagtaatatttgaagtttctcatccatttggcggagtcgtcattataatgttataatgacggctaaaaatgaaatgacagcataccagaatatgcaagaggaggaaatgaaatatgtcaagtgtcagagggattttagagagagcaagcctggatagtatgattgcctgcttactggatgagccaggaccggtaaacggaacgattgaggtaagcgaaagcgctattgagaacagctacagagagttcatattggaactaacacatctttacccgggtgtaaacaaagatgatgatgaactgtttgatgcggttataagatttgcatctgttcttgaagaaatctatttaaaaatcgggtttatcgttggcagaaaattagacggagatttgagggagggggaagaaaagcttaagaatattgtaacagcgaagtaacgtgaaaagaactgtttcctgtttttggggcagttcttttattggtgtatccttatccattaaaactaaaaatatagccgggatttcggttttgagttttttagcctgtactttctaactttgtctttatgaatccttcaacttatcgcttatgatgattcgtcttggctgtgtgttcaaaagaatatccatgtccatatctgaataaaagaaatatttttggtgaatactcttcctattattatggatatacgaggtattttgctgtgaataataacagagacagagtgctgtcatatacagaagaattttcaaaaaaatacgggtatacaccgacaacttttcaaatatcaaatgaactgtatataccgcatgacaaggtatcttctattatagaagcgttaagagacgaaggggcaattcagatcagcaggccgttatcataagtatctcgaattcgttttcctggagagtgggaaaaccatgagaaaaactatgggatttgaaatggatgtggcaggagagtactgtatggttggtttgaaatgccggtaaccgtcaatagatgatttcaatcaaatggtaattcatattatgctttgtcgttaccatgatgttccatagaaaaagaacaggtctccatgctttgtgtttttttcctgatgaagtttcattactgatactgggaaataatctattgtggcatggggctttttttatttacggtaaataaagttttaaagtaagtggcagaagggagaagtttaaataagagcgttgggaaatgggatgcagttggtgaaagcgttatccgtttgaaaacgctctgatgtgcggaaatggagtaacagattgcaggacagcgatttgaagtactcaaatagataacaaaaaacccttgattcttcaagggcttttcagtagcggaagggagatttgaactctcgacatgatctcaaaaaacctgatagaataaggaggtttgagcacattatcccaaagtgtaaacaaaagtgtaaacaaatagttattatatttggacatctgaataagtccacgagtatgtagccaatacatattcatgggcttattttagtgcctgaatttagctgctataggacgtttcctgtgtgatagcaaaacagatcaagcttggtcattaagcctgttaaaaacgattctggagcgttacagagcaataaaacgaatctatttgaaacggtagtttcatttgataaaaaactaaacaaaaaggagaacgttatgagtgaagaaagaaaaattaaaaagagagcaatcagcattagaggaatggcaggaaggattcgtgaaagagaagacaatatttatagtcaggcggttatttccgatatcttgaagatgtattttgatgaatgccagaaagcgttggagaacggagaaagggttgggctgtctactattggaaccctgatacctaaagttcatgtttacaggcgctatggtattcctaacatgaacgatccggaaggaaatcttccatttgttcaagtgcatttcaccagaagtaaactgtgcaaagaaaaaataaacagtagattcctgaaaaatctgaaaaacggatttccgggattaggagagaggtgtcagtgcaataaggcacaaagagggcttttaattagtcagggtttctcattagcagaggaggaagacgtatgtacggaagagtaacgaaatattttagcaataaaaagtttggatttattcaaggagatgatagcaatacatattttgtccatcactccaatctcaatggggaatatatagagcaggggtattatgtgtttttcaagccctttgtgactgacaggagcgattttaatgcaagaggtgtaattgttatagaagcaccggaaaggaacatgaggaatggcaaaaagtataagtaatatggagcaactgacctctgccatgactccggtattaaagggtatggtcaatcagatggcagaacgggtatatgagacactgaatttctatttgatggattattacacaggctggactccttccagttataggcggacaaaagcctttctatattcggctgtgaagactgatgcgagaatggaaggaaatcagtgcgttgcttatgtctatattgattacgattccatggacagctacgtaaatgctaccggatttcaagtggctgaatgggcaaatgagggatcacacggtggtttagtcgtcagccataagccgcatgtgtgggataacactataaaatatactatcgataatggttccttgcttaaaatggcaatacagtatttaaaatcaaaaggatttagcgtaaaagcttagatcggaaggagaattacatatggaattacgagacagagtagtagttattaatgaggacaataggaagagattatctaggctatacggagaaatggacagtggcgatctggaacgcgtagtaaataagcatttgagcgtctgtattgatgggatagaagaggatcagaaaatgccagttccgcgctgcagcgagtgcggatttttacaatgtgtagagtttacgaatagaaattattactgtgaccacgaaaatagagaaaatgatatgggatttgttggtataaataaaacgccagtaacaagccctgaatggtgtcctaaaagaaagtaattagagattgaacggcagacatacaccgtaatgtatggatagttcctaactggtaggaagtaaaagaaagccagtatcagaagttcaagaatatctgttaggttcgttctgaacctaagttttcccataaaataatgtgattaaaggactttacctaattggagaagtgtgcttgattagtcaaatgtctccccgatttgggtgcgtcaaatgcagcgcacctttcaaaccgtttgcatctgttttgacgacgaacaaatggagctattaaaggtgatttccagtgatcatgagttcgtggatagtggggcggactaacttataccaaaacaggcattttttagatgtaaaagctggaaagtgcataagaataaggctgctttagtatggaccatataggaacgattggttataggcatattgtgcaacataaaactttacattttcatttttgggtataacaagttatgcgcttgcagaaatgtttagtcatagagaattcttgatctctgatctataaaatggaggtctatttgaagataggaaacagaaagtattttggtgtgggttattatgatgataatacaggaaatcatagtgtagatactaatttgccatcatataatgcgtggcatggtatgttgatgcggtgttattgtgagaagttccataaaacaagaatatattatcaagactgtgttgtttgtgatgagtggcataatctttatatatttgataaatggtataaagaaaattactatactgtaccaaatgaaagaatggaacttgataaggatattgttcataaaggcaataagatctatagcccggagaattgcttgtttgtcccaaaaagaataaatacgttaatagtaaatgcaaaaacaatacgaggcgtatttccaataggagtctactatgataagcagaagaaacgatatatagcaaatatgaattacgaaggaaagaatctgaaaataaaacagtgccgtttacctatagaagcattctactggtataaatgctacaaagaggattatataaaacaagttgcagataaatataaaagtattatacctgtacgattatatgaagcattatacaattggacagtagaaatcacagattaaaaactggattacataatagttagcggaggaatttgtgtgaaaggattattttacaactatgatttagaggaatgcaactggttgtttaaacagggtatacagccctgtggatgcggccaacatgagaagacaggaaatacatttattgtattttcacttagtaaacaatatcgattagcagaagagagatacaaggaagaaatccagaataaataatcaaagaaaaatggtacgcgtaagcgttccaaaaaggatctcttgtagtaagtatctcctttagtagcagtaccgaaattaacaaattttgttgattttttcaaatgtattttacatgaattaacaaaaaatgttgaaaatggtacttaggacaaattaattgttagtgggggaatataacagatgttaagaacgaagcccgtatttaattatgatatagaggaatgcaacttactttttaaatatggtgtatttcctataggctgtggaaccggagataaagatggaagagtctttcatgtattcattgccaatagacaatattttgatgtattaaaacaaattaaagcaggaagaaaatagagatatgattcggctgtattttatatgtggaggttattttaaatgaagttttttatcagtaaatcaatggatttagatgaaaaggaaatcgtggtgttagcagtacttaacggattgtatagtaataaaatggagcagttagccacgtctgttaatattattggatactttgtcacaggacgattcttgaaaatgactgtgcagcgagacagaaccatattacaaaatattcgtattggtatccaatcacttgcagaaagaaagattatcactattaacgatcagaatgatgataattacataatttctaataatggcttacaagtcgatcctgaaaaagataaatttatagttgtagaattatgggaattacaaaagatattttcagtatcgaacaaaccgttcaatgtgtttgcttactttgtgaatttgatagggacaatcaataatcagactaaagaatggcatatgtcacaagatgaaatggctgttaaattggggatgagtaaacgcacagttaatgattatctggagcaactggaggaaatgcatctaatttatgcttataggcatagaaaacgaaggatagatggtacataccaaaagatcaataattcatatggacggtatggcgacaaagaaaatgttgttatagaggcattaaaatatgcagagacggttgagtgtgaggatatatccgaaaaacttgatcggagagctataaagttacggtacaatgctttttgtggtggatcaaggaaatataaagatgatcctgatactatttcagcattatataaagaatgtctgcaatataacgaatcattaaaaataaaacctgttgatggtacatatgatggggaatggagacaaggagacttattagatttatcagtatttccatcaacagtagtaaatgaaaaaatgcaatggggtgaagcaagcccttataaatagattgaaaactcttaaagacagtgtgattaattcatgctgtcttattttaatgccaatttacctgttcaggtaacaataatgctcctgtatctggggtgtaattctgagagatcgaaaggaaatacaaagaaataaatgaacgatagaaataatgaaataagagtatgcaaaaaatgcggaaaggaaattccgttaaatagaatcaagatagattatcgcaatggaggaaagtatttttctcatacatgtaaagactgctataattccagcgttaggcaatctcgaagaaataaaaacatacagaaattcatagcagatgagtctatgaaaattcaaaggcattataaacaagtccggccagaaaggatattccccatggaacagtatggaataacacctgctgccatagatgaagtttttgtaaagctgttagattataaggatgcctggatatccaattatggaaggattctgatccgttatagcgataagtattgctttaagaggaagaaatacagcgaagacggcgaagtagcataccaattgtaccggaatgtattcaacgggaaaagatggatatacgaaaaagtactggtagaagcgtggagactggttgtacaggaatttatcgtaaactatgatattgttaataatacctgctgctggcatataggcaacgataaagaggataattactacaaacatatttatccgctgaacagatatcagttcaatgccgtgttggatacatatttagagagcaaaggtgattcagaggaacagattttagaaatcatgaatagtgctgattatcggcctgatggctggaatccggtaaatatgaaaagatctgcattggggatcggctatctaggttgcgatgatgtggacgtgcaaagtaccatctatcgtaaatggcataatatgcttgcgagatgctacaacagtaaaatacatgaatacaaaccatattataggccatgtacagttagtgaagagtggcacaattattccaatttcagagagtggttccggcagaacaatattgaagggagaaaatttgatttagataaagatctgttaatccaggggaatactgtttatggagcagatacgtgtgcgctgataacgcattatgcaaatacaatctttgaagatcgagggataaatacaaatattgttcagaatccacatacggggctatttgatacgtcgatgtctattttggggaagagaaaagaaattggatcttttgtaacagaagaggttgctcaaagggagttattggcgtttaaaaagcaatttattattaggtatgcgaggaagaatagaaataaggttccgaataaggtgtgtgagtctatgatgaagtgggaaattgaggttttggagtgatgagtagaagcatatcagatgaagaggttaggtaaaaatttaagtgggtaacttatgttaaaattataaggttttctatttcaaaacctatgtaattcctgtataatgagatacaagaagtaaatgcaaccataaaagaagtactgaatatttgggggaatagtcttaaagctttaagaatggataggagatgaaataatgtctttggaggagttacaagcaaaacgtgcagagttaaaaaataactccagtattactttggaaaatatggaaaagatagctaatgaatcatctcgtgtagcttatgttgcacataattcaagaatcacactggataatttgaataaagagtttgaacgacagacaggtcttaagggaaatgatataatatttttatttgtagcggtagggcttcagttagctcgtattgttatcttaaatgaatttacaaaaacagaaaaagcgggttctggaaataggaatgaagcaaagctgcatgaatttcaaaagaaacttctggaaaggtttaattcaggcgattctataaaagaaagaccttattttgcatcattggaacatattattaccacgaagggggttccttatgatgccacagctcctctaacagataaatctttgaaaatacttttagagagagatagaaaatgggattttgatttggagccattaatttcaactgataaaatacagcttttcaaaggagcaaatcatagatttattacattggggcacgatccgattctcggtttgatttttggaacagctaatattatgacaaacacaatttcttgtgtgaaaacgcctatagttacaggcgaaataggaatacctgctcttactacaaatcatgttgtgtatacttctgatttcaaagatccgcgaatcgcaacttatggttttacagcagttatgctccaacaggcaattaaaagaactatagatcaaccgagtgcttttgtggcttcattaattaaacaaattatccatatcggaactgatttgtataccccatgtgggattcagattcccggtgcgaatctgattttatcaaatagtgaagttgaaaagcttacgagatatattagtactggagatatgatcaaatttggaacatctataaagcttgcggaatttattaatatgttaataagcaccttacataccttaatgtacaattcttcaatgtcaatatcaagagagttgtatagtgtaaagactagaaaaattatcatatattcaaatgttattgctactggaagtaatgccctttgggtcggtggaaatatgatggtaggaaacgaaggtacaattaagcagttggatataggtggtttgttagttattgtaaggcgtctaattagtgatacaaagtatattcgccaaataaaagaggaatttgtgtttggtggatttaataaaatgatacaaggaaatggactggatttggagggaacagtatgggagtaggtagatggatttggagatcttcaacactgggcagaactattgataccgtgaaaaatattatcgatgagggaagtgttgttgatggtattaaaagaactgctagagaagattatacggaggataatccactgacaagtgcaatatataaagatggtaagtacgatggaaaaatagaaggatatgtagcagcgtcagatgaatacgaagaaaagctattaaaacaggctgatgagttccttaagcagaaaacagtgtttgagtatgagcgagataattatgagaaacttcttgatgagtatgaacaggaaatagaaagattatcaagtaaatgtagtcggtcggaggcaaaaaaccttcttttacagcagttattgttaaaagaaagaaaactgaaaaaaatggctggatgagttatatttaattagaatattaggactacagtaggtaagcgcccccaatttgggtggtaattcttatggtagggagtaacgctccattacaagcatagaactggaaatctaattaataaaggcatatcagattttaatttctggtatgcctttgtttttcataaattcgacaatcaagaatcctacaacacttttcgctggtaggcatagttatttgatcattatttctctattctatgctccaaataaataatttcctattaataacgactagaaaataggcgcattctccgatataataacatcactttcatgcatttttttattatcgctatatgtagattggttaataagttgctgcacagacataagcattgtgtcctttaaactgctctcccacatagtaatggaaggacttaatttctgaaacatagatagtgcttgctgcttctgctctgcaagattagatcctgtcggcataaataatgtatagaatttaatgttaagttttttcccgattttggcaatataaattactattcccatttgcttccattcatttgatgtaacaagaatgccatctatcttctcttctccgctgccagaaagtgctatacaattaacccaacttacatctaccgttttaccatattcttcattaaaaactaatttaaatttatccaatatggtactggaattaggtaaattaaatccttgtgagatatataactccttactttcatcacgaatagcaagagaatatgcaagcgttttatcttgaaatgcaagattttcaaataaaccaatatattcttcttccttccatgctaatgcggatacgtcaaagtataagtactcattagaggactctacattaaaaccccccggaattttaccgcctccgttggttaaagaatgcaatcgttcttgtgttttagccgtcatttctatactatttgtaagcatatattgtagaatcatattttcagactgatatgcgttcatccacattagactagaggcaattatagttaacatattggtgtttggatttttcaaaaaatcgcgaattctattatgaagaacatcttcacctccaattcttttcttcacatacagttcagcgataattatatctacatgatttcttctataaattctataaaatacaattttggctttcttaaagtccgatgcggagaagattttctctgtagcaaaataccaaacacaacttaaaatgttttcaatattaagcttaaaaatttcgtcaaatttagtactatcgagaagactttcacaattggcgatatagtctgccgtagcttgtttatttccattgcagatataattccaataagtaatgtcgatttttccataactatctaaaagcatcattttactaagtgttaattgatttacttcctcttcatatcttttaaatgcatccgctaggtgatgtgatatggacattagattaggaatttcttgagacaatattcgattttgagatatagtgatggaatttttttgatcctcacggcttgatatatctacaaggcatctattaattttcatcatctcagaaaatattaattttatattagaaattatattttccataaacttaatgttatccataattttagaataagttgattcatatgaagtatatgaagtgtaaatatctgaatagtctggtgctttaaagaaagcgtgaataaatgctgtaatttcttcgctttttttatttaataaatccatttcagatactaacttatttcgctgtatatttagatcttttctagcggcaataatttttgcttttcgttcttcaattttctcatttaaggctacgataatataaagaaaaatacctgctaaggttaatcctataaatatttgcataagaacctcctaaatatttttgatttccttgagtctgtctattatgatttcaatatatgaaaaaacttcactgaattcttcactcaaaggatgttcgctaaaagataaaagccataacttttttagtcggttgcatttagataaaagattattacattccgcaagtaacacttctttacttgcaatacaacattgaatttccacgctttcaaaatccacgctttcaaaagcattgatatatcttttttctaattcagacagcttgtcatataatacaaataaatatttgtcttgccaatttctaaaagcgactgaagttgctttaatcattgcaggagaaagccaaattttggaatataattgtatatcatttgtataattaaatgatatatttgataaagtccacttggcgatttgtacttcaaatggttttaaggttttttcgtgatagacaaaagctctaccgctcgatagtgaagccatgcgttctaattgcaaggaagaggcagaaattgctgtgccaatttgatcacgatcatctttcgcggttaaacgatggacgattttcaaaccagtgtttttagtgatttcacttgtcaaagcagtaggtaattgatctgcaataacaatagcttctcttaatgctcgtacttctgcaagcattttcacgatatatgcagtcgctgatattttaggatctactgaatcggactgtgattgttgtgcagatgatgcaataatattatgggcttcttctataaatattacatgtctaacctgcatcagttctccgtttttgtctatgcctccagcaggattagctctcaacgattctaaaatataatggcaaactagtaatatgaagaaattttttgcttgttcaccgagtacttccagttccacaattgctgaaatatcgagccattcatctggttttactgttgaaaggtgaacattaaataattcaccagcatctcgttccattagacctccgagacggacttgtaaaaatgcctgtacattaccttttatttcattatcataacttgatgaatcaatttcacactgtaggttatcataaacatcttgcagacttggataaggtaatttgcaatttatggtactctcttcttctatatcccagccgagatcggtataggaacgctgaatagaattacttaaaaatttgtaagtagcaccttctaatgcaaaagaacccttaaacacctcaagcagagaatctatatgttcacttaatcgaacacctatagggaattccataggattcaattgtaatgggaatttactttgaagatgcggagagaagagatatacatcttgcatgttctcgcagcttaacaatgctctgtattcctttttggcaggttctaatgctagaaatggaatgccatttttacgcaattgtgtgactagatgtagcatggtgtttgtttttccagaaccaggcatacctgtaaagaaggcatgccgaggaagatctttcagtgcgaaattaacggtatatccattcatatctttaccgagataaattccatcttcgactagaaccggagcagtctctttggggatctcaattgcttctccatcatataatgtaggaaacctaaaaaagggaactacctctgatagacaatacgtggttgaccaactttttaggggggcatgatttggataaaaacaatagtttttggccatatcatccatacgactcagaagattaaatgtaccatcagcgtcaggagtaattggatatatagaaaaatcccccttttttagagcttcagagccagcggcatttaacagcacgtttgctttgaaaatattatctgcaaatccataaatatttactctaaaatgaggggcagtttcaatattggtcatccaatcttcatactcttggcaaatacttctgacatagttgtcagcttttataccgtctatttctttcattaacttaatgttattttcgccacgaagttctttaagaacaggagtgaatttcttacgtgtttcttcagtggtagatgtagggtataaatcaattctaaatgcacaggcattctgtggtatatatgcttgacttacagtttccattattcgaagaaggtcataaagccttgcttcttcattcatttcccatttgggtacataatgtgcagaattagttagaccggttattggattattaatatctttttctaatcgttctttctttgttaaggttgcaccagcgtataaatttatcttaggaattatgcctcttttaaatatgaagaaatcacttaatggtgatttctgcaacagaggttcaactaattctaattcattactatttccttgaatgataaaaaacacctttagtctttggcctgttgattcaaatggtaaaaatgtatacagtagatgaaaactggtcttgttttcaatacatataccatgccactggcgtaaaaagcttatatgtctttttaatacaccttctatgcctgcatttgacatggactgatatttattcaggcttaggtctggtatttgatcgattttaaaacaaattatactcattaatattccttcttgctacaatatatttaagtaaaagttctcttcttattaaaagttaaggatcggctctatatagcagatccttaactatggatttaattcgtttatgttatattaattaagtcttattttaattttgtacttatatacttttaacgtcctcctaagcgtctgcttaaaattttacgtttttgattttcggcttgctctatttgtaaccgtagtttatttgtatattcagatttcatattttcaaatagttgcttttgtgcgtcggcttcagctgcggcggctaaagtatcggctgaggctgcctccatttcaatattgcggagagattctgactgttgctcaagttcgtctgctgcctcctgcatagattctaaatgactattaagctccttttgcactttttgttcctcttcagtgacatcacgttcgtattgttcctgaagaagtgtaactgccttctctagttcagtaattaattttcgtttgtcctttgccgaaatctttgaattttgaactttcacgatttcagtttcaagttttgttttgtcagtttcaaacttggtgcccaattcatgaagctttttaccttcataaattctatcactcgattctttttgtaaaacagtgctatctaggcttcgattactccaattttctggtgacatactattctttcccccttcaatatttacagttactattttcccatcaatgagaatagttccattagatctgagttcatagtgtatatgtggttttaattttttatcgtgtattgggcgtggaaaataataatcatcggaaatatacgaaccgcgatccacaatttcatgtgtatatccatctggcgtcggttcgtggactaaacgaccatcattttcaataaaatcgtgaacaatatttccagtttcaatgtatttggattcgctgaatttgccatcccagatatgttttttcataatgcaacaccttacttaaaaagttttttgttttatattttacaagagatataaacagaagtcaaactctataaaagcaaattaatccaaattgatcaaacttattctaccggaaatttatttgatacattgctgcaaccacaaatataatccatgcttacatcatagtactttgcaagaataataattgaatccaaaggaattcttgttttgccaagctcataatcagcataggttctctggcctatatgcaggagattagcaatatctgtttgtgtcaaatcatggtcttctcttaaatctctaattcgttctgtgtaatgcatagtagataatccctccattaaataatgcaattgtatcttagagttatatccactattgacttttagagtcataaactctaaaatgaatttatgagtataaaaaaagggtaggggagggcaatctaatgaacgagatcggaaattttgatgtagaaaagacaatggaattgatttttgtaaatgatgatgcatttgtggagcagttattggagggggctactgagtttgaaagagtggaatttctgagagagtttccggaatgtttggagatgttggcttgttgcgcttgtctagcataaaagaagatcattataatagtacttcaattctgacggagggaatgccttaggtgaacactttatcgtcgaaactattttggttcgtgatttatttaaaatagaagtgctctggagactgggagaggtgtttgatcttgcgctcgccctgctaaaacaataaataagaggagcaacgcgctaattctttattctaaaatgggtgtaaaaacacccttgtaaacttgttcagttcaagggtgattaatccattaatatgaggcaaaccacttttatttgagtgcaaataaccaatgttctataattcagtccagaaatgattactatccttgcagcagtttcttccaagcttgttattccattcatatacctgacgttggtccatttcataaacataaacagttaaatcaggaatttgtgcaatgcgttcaataagtttttcgtctccaaatggtgacatcccaaaaatatctaaagatgataccccgtctagttgtgtatagagttcaggaggatcgaatggaaatagatctccggcaggaaataaagtttccgaaggataatgtccagttccgataactttttgtttatccagtaatggagaaaatacaatgtcatatccattaaattccactgtgttataacttaaagatagtttcttgacttcttttacatactctggcaaattatattgttccgaggcgtataagagtatcggccttgtgtcatgtgggatagataaaggtataaactttccatgcaaataggaacaggaattttgtggctcccaaaattctgcataatttaaggtatatatatttgtataagaatttaaaagattaatctttttttcgtctaattctggaacttttataaaatgcgtattatcataaaagatagcattgatagcagaggttttaattgcattaagcagacgatattcgtcattaccggttatttggttaatctgtccatatatgtattgataaacttcagcagccagtgtttctatattattgtcaggaaccttagcgaataatatattacataactcagaagtaaaagtaacatggaataggcagtcgtataatgggctgctatttattaaaatattacgaaatctagtgtactgacatattgatatttagcattacaacaacttcctatttggaagctgttgtaaacttaggatacaatgaactcaactttactctggcatcggcggttcggaactgccaattaacttttgctgcgattgtattgcgctcgacctcccatgcagctaacgcttcacggagcttcgcaatatttgcgattcttcgtgccaaacactgtctggtcattacattaagttctatttccgcaatgtcaagccagcttccatgcttgggggtatagtgtatttccagatgcttgataatccttcttgcctcatctgctggataccttttgtacaaggacgcaggtttatgggtgttgaggttgtccattacaagaattattttttccacatccggatacatgacatcaacgaaatattttatctcttctgcccaatcaaaggcagtacggtgttctcgcacactgacatgatgagtgcctccaagcggttcgacaaaggcaaatatactgcaggtgccattcctgacatattcagaatctattttctgattatcacctggacgcatgggcagtggttcccttgcatcgtccaataactggtaaggcttttcgtccatacaaacaactggtctttttggattgtatgggagttcatatacatcaaggacatcttccatacatgctataaattcggcatcgtcttttgtagggatgcaccagtagtcgtttttgtgaggtcgaagtttgttttttttaaggctctccggattgcctcacggctgacagaagtatcaagaacgattcttgatttctcttccagcagccggatggtccaccttgaatgtccttccggcaccggaccacaggcaagttcgatgatacgtgcttcagcacgtccatccagtacacgccttgcattatcagaattaacattacgcttaaactcagttactgcatcaataccaccttcaaaatactttttcacggtattggttactgttgccagacatacaccatttgattttgcagactgctcatgggtcaatacttttccgtgggactcatccaggtcaataataatctggcatctgcatcgaattgttttggatgttttatttttccggatgacagattttaagctttttaattcatcatccgtaagctctattttatactttttgggtcttgccatagaaaatcaccgccgtttcttttattataccagaaaacggcaataatagccaggaatatttagctaaatatcaacatgtcagcacactagtagctatattatcagttattagatcttttattccaaattctatattgatcccatttcctaacattaaatttttattactcataactgtcatcatatcctttcattaaagttttttatctgaccggttactttgaatcagcaacatgtcatgtggaggctccgattgaattttaacgctcctataacaccttccattctcttaaagtcggatttttgcaaataacaacacctcgacaaaatggaaattgccgaattcttcaaacaaataatgtatcaaggtacaagtggtgtttttaatagcaaaagagacattgaaacggaggaacgttatcgatacttcttatcaccaaacctctttttctgtaaaataatccatcagtcggttgttaaacactcgcttgatatccctcaatgccgcaagagacgaataatcaaaagcatatagtttctttttttcaccttcagttattgtaatcttggcaaattggtcagaatacttacttttagccgcttccaataacaaatccaaaaattctgttttttctgacgttgtaggcgcttcaaactcgcaaactaagtcgaagcgtgtctggagttcaagtggaatggttttttggtattctgtttcggttagaaggttcgaagtaaagataatgatgaatccatccatatcatattctcttgccatagaatctgtaaactggccctcttccaacagttctaaaaagaaagagaaaactgagcgagtagttttttcaaattcatcacataacaacacccctactttgctctttttaattttctcacttaattctccgtgattgcagccaacataacctgccgggctacctatcaaactattcaacgcatcctgactgctgtaattttgaaaattgatttttgctaaataacaatcgttctgaagtccacttgcaattagccttgcgacctcagtctttccgataccagatgcaccatatagaaaaatcgaaagaattttttgttcctttgttcgatttaacaaaataaaattctttaaggcatatcgtagccgttctttaaaataactatggccaattagattatggttgaatgtatcgataaaagtgtcaaatgaagaaccacataagtctgtaacttttgtaagtttactttcttcagacacttccacacataaatcaggaagatcagggagcaatctattaacaggttcttgaccatcaaaaaacagtgggaaatactttaacagcatatcgatttggtgagtttgagcaataactttaatattgggcataatattaagaaattgttccagtgcataaatcagagccttattgtcttcgattgcgtatgaaatggacgttaaatccaatatagccaatttacaaatattattgaattgttcaaattcttttcgtagatcgccgtttgcccgagaaaaagttgcaattgggatatcattcgtttctgaatattgaacgattttgtctaagtcttgtgcgttattgtatttgtaaatcttttgtctgagataagggttaaattcaagcgtctcctttagtttagaatccctctcttcatgttcttcaaaataacatttataatcagaaaacaaaagaggaagtagttctatggcactttctgcaaggacttcttccacaattataacggtatctacatccatgcttgtgaaatttatatatgccgattctatattatttttgttagttagcaacaaatgaaccaaggcagatatatcaatgcatgattcagaacagtaatcaagattatcctttgtttctccaaatataaaggggaatacttccctttcttcttgtattttcctcaattccttaagattacgataagtaaataaggcataaaaatccatagtcatttcctccacagcttgctcaaccaaataccgaatcggttccaccagtgaagtttgggggcaggagtttcttccagtttgaatgtcacatcttgaattattgccaatgtatcaacgaaatgatagtcatcattactcttttttgctgacgtatcatgtaaaacagaatgcgtgttacttttgattattttgctggcggttgcctcttgcttttctttacgagaacctgcttcttggaaataggtgaatgtatttgaagtaataaattcttctcctacgattcctttatagatgccaacaatagaaacgtgaccaataagcaaatcgttgatattgtacttgttttcaaactccgattgaatctccataggaatcttaatgatgatttcagatacagaatgtttcatacttttatcatatacaatgccctttaaaatataggcatagtcctgcagcatcgagctaaccagattatttacttccatcccctctacttgcataccttttaatgcatcgcggcgcagaataagaaattggcgcagactttcttcgtttagcagttctaatttaacgtgatccgccttaacaagatcgccctctgccgaattatttaatgtagtaacagatgcgcactgctcaatgactctacgtaaaaggagggatttggttgtctttacatctaagctttccactacttttgacgacgacgtggaagtttcctttgcatctgatgaaatagacgccttaattccatcaaggaattgttttgttccttgtgcagagatggaagatgtaaaaccatactgttcttcaaaactgcttgatttatcagtttcaattttagtaaggataacattgttgatcatcattgcgatttcatataccttactgaaattcagatagtaaatattaaaatcatgtgatttatttttctcagttgtatccaaataggttacctccctatattttataagtatcagcggtacccaacgctcatccgctatatcctcggcaaatttcgattggttgaagtgttttcaccattagtttcctccattttaacacatggaactttctgttacaacgtttatgaggtattcttaaagatatagttcgagttcggcagaaaatttttgtgacacatgagttgaacagataccacctttaccagaataaagcgcgccctattaaatgtaaacataccccgggtacctgtcacctgctgccatccctaaatagcactcaaattgcacgaaacaggccttatttcggctcgaacaatcatacacctacatcttaccacatgacgttataaaagccgtatttgacccgtatacgcgattaaaagcaaggctagaagttatatattgaatgcttctagcctataatttatcccatcaatgaatacgcttctttttttgccttctcgtagctctctttgacttctgaatagctaagattgtcaaaatgtctagccgttgcaatcctgttttcgtaatctgtcagagaatcccaaaatatcacagtatcatcgatctgaattgctgaatcatgatttttgttgaaaaatgagaatgcctttttaaggtcttctttagtaggattcgtctgtttgtcttctgtgtaaattcgattgtgaaaaatatctattctctcgtattttaaaatcaacatagttgtatgtctccttttatatgctagggtgtaggctttccatggcttacacccttattttttacgcttctatcagatccttattgtctgcagtatgtaccttagaacttccataatattttcttgaatcgtccagcgataaaactttatgacttttctttctgaaagcttctgtatgaaaataccatgctttctttttacctgcatacttgaaacccatagcatttaattctttgtggcaggaatatgcattaaacacccaaatccactggcctataatctcgatctctataccgctcaaattgatgattttttgcaatacctcgcgtaatgcaacgtcgttttcccagtcgtacatatgcacgttgtaagccgattctttaccatctgaggtgtctgtctgccttgtgtcgtgaacgtcctttaaacgcttaaataatgcctcatattcaacactgattgctttggttgcttcttctgacccatttttgttgttagggtgatactgtttaagcagcttcttgtactggctccgtagttcttccagtgtagacgcgttatcgaaataccttttcatatgtcctcgtcctttcttatgtgataggcggtatttttcaaccgccttgtgatttataagaattaaataaaatcgctaatactcataccgggcgcatcccatggattgctagggccgtattctttactctcattaaagctttccatctcttgtctggcttgttcggcctccatattacaaagactttcaatgaattcctgactttccttttctaattgttctggagtttttgaaagatcttcttttaggctttcaatccattcattgatctgttcatccgtgtagtatttctcagcgtcggcgatttgcttttccttactattgcatctgtttactcttcttagaagaagaaccgcctttaaaatatttaaatgtctatccattgtttatacctcctgtttaatatgtggttgtgatctatttgataatgtaattatataccctaaatgtagtgacatcaatggtaaaaagtgacaatgtttagggtatgtttatatagaaaatcactacatttagggtactcttgctttaggggcgaaaatatgatattatatttacagaaaggatggtgaaaaatgtgataagttatgaaaaattagttaataaggtaaaagaaaataatataactcagtataaactaaagcaagacaaaattcttggttctgctactataactaagatatataaaaataatggaatcaatggggaatcaatagatataaaagttgttgataagatgtgcaaattgttaaaatgtcaaccgggtgatatattagaatgcgtggacgatatagaagggtactcggatacctcagaaagacattatagaggataaaaataggagcgtgaagtcgttcttattttttttatctcgacataccctaaaagtagtgacaaagtaaacaaaaaacataccctaaaattagtgatgtttactattgatgtcacaacgtttagggtatataatgtacttacaaggtcagatacaacagatcttcaccaaacaccgatagccccgaaatggttataaaagtcctagtcaatatacctgtgaggtacaagtccaatagtcaggaagattactaggacggtgttagaacattgaaaactcaatatagactttacaccttgcatatgttacacttataataatcacttgagagcatcgtaagaaagaagggatcatatgacagttgacgaaaaacttgattttttaattgctaatatggcaactaaagaggatatcaaagacatggctacgaaatcagatcttaaagaaatggttgccaaatcagacctgcgagtcgaaacaaacatggttttcggtgagttagattctactgaggaacgtatcaataagaaatttgattccatcaatgaaattttaaagaaaatccgtgaggatataaatgctaccagatatagtaatcagacagtcgaacttttattaaagcggcaggataaacttgaggaagaattacaagaactgaaaagaaaaatatcataatcaaaaaatacatagaggtgtaaagtctaagagttatcaggactttgcaccttttttatttaatcaatatataaggagactgattattatgtgtagcacaatgaatgaactgtcagctatagcaaaacaggtttacgatctggaagcaaagaaggctaaaaagaaaaaggaacttgacgagttggaggcacagataaaacagcttaagcaggaaacggtctcatatatgaggaagcgcaaaaagaatgaattggatgtggacacctttaccgtgctatttacaccgtttgtaaaaccttcctttgattctaaagcgttcatagccaatgaagagaaagggttggaaatttacaacaaatatctgaaaataattcctatggaacgagttaccgtaaagcttactaaattctgaaatttaccgcctgtcatctgaaaaaggatgtagaatcaaattcaacaggtggatttccccaaaaggaaaagaatatgttttgaatttccgctgagaattagagattcagcaggtgtattaaagttaccctaaaaacagaatgtgaaaggagcaaacgaattatgatgagatggaacacaaaaaagggaaatatcaatgcaggcagtattgaactggataatgtgatatttaatgaggatcatttagatgtttgtatagacatttgtgatatgtctgaaggacttaaggtggaagtaagcagagcgattgaactggaaaagcagagatattctaaagagtgggaagaaattcttgcgaaacatgaggaatctaagcggtacagcacaaagtggagtaataaacctgttgctattgactttacttgtttatggattacgttagaaacgggtaagccgattacatatgtaattagtacgggtttccatgatgcagaaaatgaacgattagcgccagtagcagaaattgaggttgatctgtctgcttatattaatgagttgaaaaaagccattcttcatgtttttgtagaaaaattcttttaaagaaagacgatgtgtgtataagaacgtttattgcttggggatttaccctaaaacgcttgtaggaagaaaggaagatgctatatgaaaaagtatgttgtcgaatatttagagaatggaagcagttacgtaattagaacattcactgattttacaattgcaatggatttctacaatcgtatacgtaaacgggagtgggcgagattgtcataattcagggtaaatggttcttgtggggttcgattcctcacataccctttagctaattagcagtagcaagaaacaatattatataaggaagaagagggcagttctatgaaaaaacatgcaacgattgcaaatttaggtacagttgatttttccaaaattgaattaatggattcatatgaaatctacattgatatagctgaattatcggctgatttgaaagaagaggttgagaaggcggtcgaaaaggaaaaaaagattcatgaagaaacagataaagcttatatggaggtatgggggcagagctggagcaagacgggggttaaaacaataccacagttacatatcattcttcctatggagggaaagattcaatatgaattatcggtttacttttttgatttggaagatgacgatctggctgatcgtgttattttacaaattgatttatctgaccatatggccgaattaagaaaaatgatatttcatgtgatggtagaccgttttttttagacaactacataatcaatggggggcgaaagccttcccacaataataaaaggagactaaaagcaatgaacaacacatttacaatgtcaacaaggtatgaactgacagaagaaggaaaaaccagattatcaaaagtaattacatatgaaagtggaaaccgcgtggaaattccgttgaactgtaatggctccgtcaagtggtttaatgataatcagttaatgaagaagaaggaaacagcatagcgatacaggcagtgacggtttagccgtgggcgattcagttcgccgcttgccattgcaatttaaatatctatgaaaggcggtagctatgggaaaagggcaagtcagtgagaataagaaaaaactaataacactcgcggaagattttggactttcagacagggaagatgttaaacgtataattgcggaatatagcagctatgagcaaagccataaagcattaatgaaagtttatgaagcggtgtacttggggaaacaatgcaatcaaaatcaaacaaataaatttaaaggagagtataagcgtatgattgcaacggtgtacaaagggaacataataaaaaacttaataatggactgccaatcttacgcaaagtaccgcccaaacgagactacgggcggtatttttgtatcatggcggagaaaggaggaacttcccacgggggcttgactgaaaagttgagccccttttttcatgccaaaaaacaggaggtaaatgcttatggcagatgataaaaccacaaaaacgccggaacagccggtaacggataccggaccgggcaaagaaacaccgcctactcccccaaaagagccggagaaggtttccgtttccccggagccggaaaaaaagacggaaccggaggtaaagaacccgcaggtttccgtctataacttcgctgaaattatgaaggaaaagaaggtcgaggaacgggcggcagctcccagcggggaaaagcctgtcccggcaaaaacggaaaaaccggaaaagcagccggaggctccgaagaaagaggaggaaaaacccaaagagccggaacagccgaagcgccggggccgtcccccgaaggcagataaggacaaggacgcagccccgaagcccaaagctcccgcacagaaaccggaaaaggcggtcaaaaaggaaccggagaaaaaaacggctccaacggtgcagactgctcccactccgaaggaacccgaaaagccgaaggatgcaccacgccggggcaaggagcagatcgtctatatcaagctgaacgagctctacgccttcaagaaccatccctttgaagtccgggatgatgaagaaatgcgggctatggtgtccagcgttaaggacaagggcgtgacccagcccgctattgttcgtccccgtgaggatggcggctatgagatcgtgtccggccaccgccgccagaaagccagtgagcttgccggatatgcggatatgccctgtatcgtccgaaacctgacagacgatgaagccatcacccagatggtcgaggacaatctgaaccagcgtgaagaaatcctccccagtgagcgggccaaagccttgaaaatgcagcttgaagctatcaagcaccagggctcccgcacttcgggccagattgacccgaaggacgctggcaaacgctccaacgagatcgtggccgagcgcaataagatggcggtcaagcaggtgcagcggtatatccgtctcaatgagctggttcccgacctgatgaagttgatggatgaaaaaaagctgggctttactacggcggtggagctttcctatgtcagcaaaaagaaccagaactatatcgccgttgccattgacagccagcagtcctctccttcgcaggcgcaggcaaagcgtatgcgtgagctggacgaaaagaagctgctcaacggggatgtgattgacggcattatgatggaggacaaaaaggaggtagacaaagtgattttgacaggtgcggaactgagcaagtatttcggcaaggaaactacgccgagggaaatgaaggaccagattatcaagctgctggacgactggaagggccagcagaaggaacacgaaaagccggagaagaaaaacgaacaggaaaagtaagccgaaacctcgggtcaacgtggcccgaggattgcggggctctgccccgcgccccgaagctctggagatataaattattccccgtcgccagttattccgtagcatagccgggaaaatcagtcaagggcagcgccgccgcaggcggtgccagaggcacccttgacggatttctcccggttatgctttttcccgatcaagcgacggggatataaattctccagagccgttccccttcccgggggaaggggcggagggattgggcgataccttgcttttccctaaaccaaaacagaaatggaggctcaaccaatgaaacgacctttagcgtacctgaccgccgcatggagcggcgagccggatgttgatatggagctggcggcccactactgccgccttgcttatgaggcgggcttttccccaatctgcccgctcttgtatctgccgttgtttttgaatgacagcgttcccgaggaacacaaggccgggattgatatgcgccgggatatgctgcggcgctcccataccctgatcgtctgcggcagcgttgtggacgaggatgtaaaaaacgatattgcggttgccgggcggctgggcattgcggcgacaacgctggaaggggtgcttgccgtgaagggacacggcaccccgggctatgccggacattaagctggggagcctttttgacgggatcggcgtgttccctctggctgcttctcggtgcggtatccgtccggtatgggccagcgagattgaaaaagcgcccatctccataaccaaaaggcactttcccgatatggcgcatttgggagatattacgaaggtggacggcgggaaaatcccgccggtccatgtgataaccttcggctctccctgtcagaacctttctctgatcggcaaccgctccggccttgccggggcaaaatcaagcctgttctatcaggcgtttcgtatcatacaggaaatgagggatgctactgataacctatatccagctatcgctgtttgggaaaacgtcatgggagcgttttctacaaatgaccggatggactttagagccgtcctatccgccttctcggacaccgaagttccaatgcctccttcgggaagatggggaaacgccggaatggtgcgagggggaacgcctgatgtgtgctggcggctcatggacgcccagtattgggcaggctcccgaaggctggcacgaaggcagcggattttcgtcgtggcggattttggaggcagacgtgccgcagacatactatttaagccccgtccaatgctcccacttcctccgccttgcggagagggcgggcgggccgccgccgaaggagatcgaacagcttcttttgaaacagggcggcagataccagtcatccacccctttcagtgcttccgtatgcggggagcggcaaaaaggcaggaagaaacggccttccgaaacagcttcggattaccaactgacccttttcccactcttttagccagtgatgtaacgccctttgccttctggcatgagggcgacccggagggcggctgtatccgttttctgacggaaacagaaagtgaacggctgatggggctgccggagggctggacaaagtacggggcggacggcatggagatccggcctctgcaacgctacaaggcgctgggaaatgcgattgccctcccttgtgccgattacattatggccgggatctatgaggtgctggctgaccgggccggaaaggaggaatgagcccatgtttgaagcctatataaccaatacagccctataccccttaatgggaatcgaggtagggacaacggtacatttccccatgacgacacaggagttgcaggccgcccttgccaaaatcgggatagacgggaagcggtacagcgaagtgttctttaccagctttgacagtgatgtgctggggctctacgatcatctctacgaatgtgagaacatcgacgagctgaacgagctgggccacgccctgctggaagtacgggataagggcggactggaaacctttgaagccgctcttgtcttaggaaaccacacaaggagcgtgaaggatttgataaacctgacgcagaaccttgacctttaccgcttttacccggatatttccgatgatgaagggctgggccatctttacgccgacgagctggggaccatcgacataccggagcacattcagaactacttcgattatgaagcatacggacgggatgtgcgtatcaacgagggcggcgtattcgctcccggtgggtatgtgtcggtagtcccggagggcttcaaggagtattatcacgggccgcaggacatcccgccggaacaccggatatttgcctatcctgaaaaggccgagcctgtccactccattctcgccgcactcaaacggtttcaagaagccctgcccgctccgaaaaaggacaaggcggggccttcccatgaagaacggtaggacttcgggccagcatggcccgaagcatgaaggaggtgcataccatcaactattaccctatcaatgaaggggccgcccgtcgggcaaaggaaatgaacagcttttccgattacaaggaagggagcgcaacggcggaataccgggcaatggtggacaaggccgccgccatagcggaacagcagaaatcccgggcggaccccatgtaccatgagaagatcgaccatctgctggacacctacgcccgcaagctggccgaaaacatgaaccagggctttgccattgacgcaagggttccctctgtgatgatcgccggacctgccaatttcccggtgggaaaaaaggaaaagcaaaaccgggctcgggacagcaacatggaggaatggcggtatattcaagggcttctggataagatacgcagtaccggcatgggtgggatcagcgccgatgacccggcggccattgaaaagctccagaagaagctggacgggctggaacgctcccagctcattatgaaggaggtcaacgcctattaccgcaagcatggcaagctggacggctgtgcgctgctgtcgccggatcagatcgaaaagctgaaagcaagcatggcgtcaagctggcggagcgatccgaggccctttgaaggctaccagcttaccaacaacaatgcggaaatccgccgggtaaagacccgtatcgaacagctttccaaacaggcacagcaggaattttccggctgggagttcgatgggggccgtgtggaaatgaaccgggaggacaaccgcttgcaggtgttctttgatggaaagcctgacgctgacacccgggccgagctgaaaagcagcggctttcgctgggctcccagcgtgggcgcatggcagaggcagctcacggacaacgccatccgggcggctgaccgtttggaatgtatcaagccgctgtccggcgaaaagccctcccagcttcaaaagaagccctctatcttgcagaccatgcgggaacagggcaaaaaagtccagacggagccggaaaagaaagcaccgtccggcagggatgccgagcggtaagcctcgggccacattggcccggggttttctgttccccgagattgtacgggggcctcccggatagcgggaaccccgacggaaaggaggttttatgcaggaagaagtaaaccaaaaaacggttgccctttcgatcaggacaacgaagctcacgggaaaagtgctggctgccgctcttggaaaggtggcgcgggcggtgcaaaagcaccatcggaaggcgctgaccccgcagggacgccagagcgtaaaaaagctgatgaaccactatggcggcaaaagcgccatgccctatgtgggagctccaaaggattttgaccggatcgcgaaggagttccatgtggactacgctttccataaagtgagccccggtcattacctgctgtttttcaaagccaatcaggcggacgctatcacggcggccttccagaagtacagcgcaaaggtgctgaataaagagcaggacaaggcttccatcctcggtcagcttcggaaattcacggagcagatcaggacacaggcaaaggaaaagcagcggaccagagaggcggtgaaggacggacgttgagtgacaagatcagaaaatatgtgctcccaaacctgccgtacctctttgtgttctggttcttctccaaaatcgggacggcctaccggatcgcccccggcacagacttcgggacaaagctcatggggatgctcgacaccttccccaaagcctttgaaacctactggccggggctgggaggtattgacctgctggtgggccttgccggtgcggctgggatgtatctgctgatacagtcaaagatcaggcaggcgaaaaaattccggcgggatgcggagtacggcaccgcccgctttggaacaaaggaggatataaagccgtttgttgaccctaaatttcagaacaatgtcattctgaccgggacggagttccttaccatgaacacccgtccgaagatacccgccaatgcccggaacctaaacgcctgcgtcatcggctcgtcaggttcgggcaagacaaggttctggctgactccgcagctccttcaagcccattcctcgtatgtggtggtagacccgaagggcggcaccctcgaccagtgcgggcggtttctgcaacgggagaaatacagggtgcgggtgttcaacagtatcgacttttcaaaatccatgcactacaatccgctggcctatatcaagacagaaagcgatgttttgaaatttgttaccgccctgatcgccaacaccaaaggcgacggcaaggagggcgacgagttctggaccaaagccgaaacccttttgtactgcgcccttgtggcttacatcgtgtttgaggggccggaggaagaacgcaacatgaatacgctggtggaaatgataaacagcatggaagtccgggaggatgacgaaaccttcaaaaacgcggtggactatatgtttgacgggctggaacgccgcagcccccagcacttcgccgtgaggcagtataagaaatacaagctcgccagcggcaagacagccaaaagcattttgatttcctgcggtgcaaggctggctccctttgacattccacagctccgggagatcatgtcctatgacgagctggagcttgataagctgggggacgaaaaatcggcgctgttctttcttatcagcgacacggacaccacctacaactttttggttgccctcgctttttcgcagatgttcaaccttctgtgtgaacgggctgacaacacctatggcgggcgtctgccctaccatgtgcgggtgctgtgggacgaggctgccaacaccgggcaggtgccggggctggaaaagatcgtggccgtcatccgctcccgtgagatcagcctgacgctcttttatcaggctatgagccagtgcaaggcgctgtacaaagaccattccgaaaccgtcatgggcaacatggacagtatcgtattcctcggaggccgggaggcttccaccctaaaggatatttcggaaaactggctgggcaaggccaccatctctatgcagaccgagggccgaagccgtggacagtctgaaagttacagccagaatatgcagcggcttggccgggaactgatgaccaccagcgagatcaccaccatgcccggggataaatgtatcttgcagcttcgggggctcccgcccttcctgtccccgaagtatgacttgaaaaagcacccgaattacaagtacacagccgaatttgataaaaagaaaaacgccttccgcttggaaagcctgttccgccaccggccattgagactaaagccggaggacgaatacacggtgtacgaagtggacggctccgacacggacgaagaagctgacctgttgaatttcgatgatctggacagcgacgagtttgtgtaacttcgggccatgatgacccgaagcgccgccgatgtaggcggctttttttgtacccaaaaccatcaaacaaacaaaatggaggaacgtatatggaatttttcaatcaggcaatcgacattcttaaaattctggtcatggctcttggcgctggtctggcggtatggggcgtcatcaaccttctggaaggttacgggtcggacaaccctgcggcaaaatcacagggcattaagcagctcatggctggcggcggtgtcgttctgatcggccttcagcttatccctctgctgtccggcctgttcagctaagtgtcacccgttgtccctttttccagaaaaggagctgatgtatggactttatcatcgacgcaatcgttgaatggctgaaaggtctgctcgtcgatggtattatgggaaatctggacggccttttcgataacgtcaatcagagcgttggcgagatcgccacacaggtaggcacgaccccggcggactggaacgccggggtcttttccatgatactacagatctccgaaactgccattctgccaatcgccggggtcatcctcacttttgttatgacctatgaactgatacagatgctcatagaacgcaacaacctccatgaagttgacacatggatgttttttaagtgggtgttcaaaacctttgtggctgtgatgatcctgacgaataccttcaatatcgtgctggcggtctttgatgtgagccagcatgtgatacagcagtcagcgggcattatccagaacgggacagagatcacgccggatgtgctggacagtctgcggacagagcttgaagcgatggagttaggccctctgttcggactctggctacaatccttcctgatccagcttaccatgattgccttaaacatcgtgatcttcgtcatcgtatatggccgtatgattgaaatttatttactcacaagtttagcacctatcccgtttgccacagtccccaacagggaaaccggacacatggggcagaactatttccgctccctctttgcggtgggctttcaaggtctgttgatcttagtctgtgtcgccatctatgcggtgctgatccagagtatcgccaccgacggcgaccccatcggggcgatctggggctgtgtgggatatacggtgctgctgtgttttaccttattcaaaacaggcagtcttgcaaaatccatcttcggctgccattaagagacttcgggccatgatgacccgaagcggaaaggaggatcatgccgaaagaaaaattttcgataatctatgcagatccaccgtggcggtatgagcagaaaaacaggcagggatcagcagagcttcattatcccactatgagtattgaagaaatctgttcccttccagtggccgacttggctgcaaaagacagcgttttgtttctgtgggcaacattcccacaactgccggaagccttaaaggtcattaaagcatggggcttttcttatcgttctgtggcttttgtatggataaagaggaaccggcgctcctactcatggttttacggtctggggtattggaccagaggcaatgcagaaatttgtcttttagcagtaaaaggacatccgaagcgtaagtctgccggtgttcatcagcttattgtttccccgatagagcgtcacagtaaaaagccggacgaggccaggcggaaaattgtagaactgatgggcgatataccacgagtggaattgttcgccagagaaaaaaagcccggatgggacgtgtggggaaacgaagttgaaagcactgtaaacttgtaacagcttcgggccatgctgacccgaagcggaaaggagaaatccatgcaggaaaaaactgcgggcggaacaccagccgcccctataaagctggatgtaagcgtgcgggtcattgaacctgtgaaaaacctcatgggctttgccagcgtgaaattcaatgactgctttgtggtggaaaatctgaaaatcgtacagggcagcaagggcctctttcttgggatgcccagccagccggacggcaaaggcggctatcgggatatggcctaccctgtcacaaaggagttccgggaacagctcaacaccgctgttctgcaagcctatgaggcaaagctggaacagatggcggagcgcggctctgtggggcgtgcgtccatcagcgaccagctcaaggccgggaaagcggctgccgaacaggcaaaggcggaacggcctccgaaggaaaagcccagccgtggtgcagagcgttgacctcgggccatgctggcccgaagcagaaaggaggcgggaaccatgccacgcaaacggacgggctatgacgcggcctgctattacgacggaaaactgctgggccgctgtaccaaagcggacagcgacgcctataccctgttgatgaacgcctgcggcggggaggccgcccgtgtccttcgggaatatgcctatttttccccagaactgaaagccatcttggaaaaggcggcgctcatgcaggcggaccggagccggacgggcggaatgttccatgcgccgaaaagctccccgtggggcgaggtgcagagctgtgaaaccctctgtccgggggtgtttctggtatctaccgccagccacggcggaacgatggtggcaaatgaggtagccgccgtcctctccccagcggccaaaaagtgcggtttcaaggataagggctatatctgctatgaggaggacgcacaggaaagtgtggtgctccgggagctgctggacaaaaaactgtggaacatccctgaccgcattaaggacaaagagcagtttgaagaaaacctcaatcagtccatccggcagtataaccccgaatactggcgggcaaggcagagcggacgagaagccgtcgaagctgcccgcagtacagccccagccaaagaggccgcaagataacctcgggccatgctggcccgaagcagtaaaggaggtgtacccaaatggcctatgtgccagtaccaaaagacctttccaaaatcaagacaaagctggccttcaatctgacgaagcgccagcttgtttgtttttccggcgcggcggcggtggggctcccggcctacctgttttcccgtggaagtatcgggaacagcgccgccatgttcctgatgatcggcctcatgctcccgttcttctttctggctatgtatgaacgggacggcctgccgctggaaaaagtgctgaaaaatatcatccgcacccggttcctctatccccgtgtgcggccttacaaaaccgaaaacttctatgcgctgcttagcgccagaaaggaggcgcagccgattgcgaaacaacagaagggccggaaagcccgcaggcagaaagcctgacaaaacgggccttctcggcctgttcacaaagggaaaggacattcccaccaccgcccagcagaccctcccttaccgtgaaatgtaccgggacggggtgtgccgggtagcggaccgctattacaccaaaaccattgaatacgaggacatcaactaccagctcgcacagtccgaagatcaggcagccatctttgacgggtggagcgcctgcctcaactactttgacagcagccttccgttccagctttccttcctcaaccaccggagccgcccgggcagccggtacagcgtgaacatcccaatgcaggatgacgattacaacagcgtccggtgtgagtatgtggaaatgctggaaaaccagatcgccaaaagcaacaacggcattgtccgcacaaagctcctgaccttcggcgtgaacgtggacgaccttcccaccgccagggcaaggctggaacgtgtagaggcggacatttgcgggaacttcaaaaagctgggcgtcaagtgccgctccctttcggggctggaacggttggagcttcttcacgggcagctccaccccggcagcggctcccccttccggttttcatgggatatgatccccaaaaccgggctttccaccaaagactttatcgccccggacagcttcgacttccgtttcagccgtctgttccgggtggggacgacttggggcgccgcctcctacttgcagattttggcctcggagctctcggacaagctgctggcggagcttttggaaatggatgcggaaatgaccatcaccctccatatccagaccgtcgatcaggccgccgccgtaaaatccatcaaggccaaagtctccgacattgacaagatgaaggtggaggaacaaaagaaggcagcccggtcagggtacgacatggacatacttccgcccgaccttgtaacgtacagcaacgacgcaaagacccttctggaagatttacagagccggaatgaaagaatgttcctgctgaccttccttgtggtaaacatggccccgacccgccgggagctggacaatgacctgttcacggtgtcgggtatcgtccagaaatacaactgcaccttgaagcggctggacttccagcaggaggacggttttctttccagccttccgctgggtcataacggcattgagatcaagcgtggcatgacgaccagctccacggccattttcgttccctttatgacgcaggagctccgcatggatggcgaagccgtctattacgggctcaacgcactttcccataacgtcatcatggcaaaccggaaaaagctcaaaaaccccaacggcctgttcctcggcgtgccgggctccggcaaatcctttgccgcaaagcgggagcttgtgaacgtgttccttgccacccgtgaccggatcattgtggtggacccgatgggcgaatactcgccccttatcaagcggctgggcggacaggtcatcgagatcgccccggacagcccccaccacatcaatccgatggacattgacctgagctttgacgaggaaaacccgatggcgctgaaagccgactttatcctgtcgctgatggagctgatcgtcggcggcaaggacggcttgcagcctgtggagcgtaccgtcattgaccgctgtgtacgccagatgtaccgggaacacttgcaggacccggaaacaagcaaaatgccgaccctccaaaccctgtatgacctgctctgttcccagccggagggcgaggcggtacggctggcaactgcccttgaaatctatgtgtcgggttcccttaacgtgttcaaccatgaaaccaatgtggacctgaaccgccgtctggtatgccttgacttaaaaaagctgggtgccgggcttcggacgattgccatgctcattatgcaggacttggtaaactcgcaggtgtccatgaatttcctgcgcggtatcgctacatggtgctacttcgacgaatttcatgtgctgctccgtgaccgtctgacggcaagctattgtgtggcgatctggaaaatgctgcgaaaaaaagggtgcgttcccagtgctttaacgcagaacgtgaaggattttctggcaagcccggagatcgagaacatctttgaaaactcggacttccttgtgcttctctcgcaggcacagggggaccggcagattttagccaaacagcttgggatcagcccccatcagctttcctatgtgacccataccaattccggcgaagggctgctgttcttcgggaacaccaccatcccgtttgttgaccgcttcccgcagaacacagagctgtacgccattatgaccacccgcccggaggacaaaaaacaggaaatgaaccgggcataacacacttcgggccatactggcccgaggtttggaaaggagggatacatcatcggaaagaaaccggacaaacggaattttcaaaggacggggccgacggaggataccgggggcaatcgccccggaccggctgaacgggaaagaccttcccccgcaccatcccgacgtctgcggtttgaggacgaggataccggacaggacagcccttcgggccatgatggcccgaagtccaaaagcggcaagtttcaagaggacagccggaaaagccgtccctctgaccgcatgaggcaggaagatgaagcgggcaggccgcaggataccggcaaggcacaggagccggagggctccgccgagaaggccgggagcaaaaaggacaagtaccagaaagcacaggcaaaagcggaacacgccggggaaaagctgggaaaggcccgggagaaactggacaagaccgaggcaaaacgggcagcgaagaagccgccggggcttgcaaaaaaggcagtccggggagcccgcacagaagcgtggttctatgtccacaacaagatacacgaggttgagcatgaaaatgtgggtgtggaaggagcccataaatccgagctggccgcagaggccggagcccggaaactgacccgctatgccaaacgccgctggcgggaacacccagcccggaaggtggcaaagtgggaacggaaggacataaaagcccgggccaatgtggattttcaaaagatggcctccgagcacccggaacttgccagcaatccgctttcccgtgtgcagcagaaatggaaactgaaacgccggtattccaaagaagcaaaggcggctgcaaaacagggcgcaaaggccgcaaagaaaaccgctgccgcttcgggaactgcgacccgtcgggcggcgcagtttgtgacccgtcatcccgtggcggtgctggtcctgctcctgctgttgctgctctgttttcttgtgtcggcggtaagctctatctttcccacgcttggcagcggccttgccaatgcgttatccggcacctcctacgcctcggaggatacggacctgctgggcgtggacgaggactacacggcactggaaaacgagctggcgcagacggtagcgaacatcgaaagcacccatcccggctatgacgagtaccgctattccgtggacgagatcggccataacccctatgagctggcatcctatctttcggcaaagtaccatgtgtatttccgggaacaggtgcaggacgaactgcgggagatcttcgaggcacagtatgagctgaccttgacggaggaagtcgagatacgctaccgcaccgaaaccagcaccgacccggagaccggggaaaccaccaccgaggaagtcccctatgagtattacattctcaatgtgaccctcacaaacaagacgctgcccgccgtgatcctgccgaggcttaacgaacagcagcgggaaatctacaccgttatgcaacagctcaaaggcaacaaaccctatctgtgggaagggatttacaacggcggcgaagataccggccccagctatgagatacccggcgaggcgctggatgacccggcttttgcggcgctcatggaagaagccacaaagtacatcggctggccctatgtgtggggcggctccagcccgtccacctcctttgactgttcgggctttgtctgctgggtgtacacggccagcggcgtccacaacctgccccgtaccacggcgcagggcatttacaaccagtgtgctatcatttccccctccgaggcaaagcccggcgatattatctttttcacgggaacctatgacagccccggccctgtgtcccatgtggggatttatgtgggcgacgggatgatgctccattgtggttcgcccatccaatacgcaaacatcaattcaagctactggcagacacatttctatgccttcgggcgtctgtgagccagaggaaaggagtccttgcatgaacaagatcgacaagctcgataaggaactggaaaaagcccgggagaaggctgccgagtggcaggccaaaatccgggagctggaaaagcagaaacaggaggaagaaaacagccagatcgtgcaggcggtgcgctccctcaaactgacgcccgcccagctgatggcttttctgaatgaccccaaaaacagccttaccacttcgggccatactgacccgaagccggaggcacccgaaaaggaggacacagcccatgaagaaaattaaataccgcaggctggcggcgatagctgccagccttttgtgttgcctgatctttacagtcccggcttatgcacagagcagcgagccgcagccggagacaacgcccgccccggtggaaaccgaagcggagccggaaacccagaacccctttaccccggacgggacgggaaccgtggtggacaacgccaccgacgaggacggtaaagagttctacaccatcaccaccgcagacgagagcgtgttttatctggtgatcgacaaacagaaaaccagcgagaacgtctatttcctcaataccgttaccacagacgaccttctgcctcttgccgaacagggtaaggaaccgccccaagaagtgaccccggagccagagccaaagcccaccgaacctgtggaggaagtaccggaacccgagccggagaaaaaggacagcccccttctctctctgctcctgatcggcgcggtggtgctggccggcggtgggattggttactatttcaagatttacaagccgaagcatgaggccccggatttggaggatgattactgcgaatatgaggacggggagctggaggagatcgcagaggaacccgaggacgaagataccccgccgtgggaggaagatacggaggaatgagaatgaattttacaagcagcccttttgaacgaatgatgaaggaagtaccgcaccccggctgggacaatgacgacccttgtaagggatgccgttactacaaggagtgcaaaggaaagaaaaaacagtgccggaagaagttccgggcgctgatcgtggagccccgcccttcgggccatcgtggcccgaagtcttaaatggacgcccgggagctgacccgtgacgagaagaagaaaatccgcactctggtcacggggatgtgcgccaactatgaccgggaaagcggcctatgccttcctcttgactgtgcctgctatatgctgcacaagtgctggacaggggcgtactgccgttacttccgtgaggctgtcctgccccttaacctggagcttcaagcgtcgctgacaacggaaggcatctccccggagctgcgggcctgtgcggtctgcggaaaggcgtttttgcccgaggggcgtcaagcctactgttccgacgcttgcaaggccgaaggaaaccgccggaaaagccgggaacgcatgaggaaaatgcgggagaaaaggccgggcggctgttacgatttgccgcctccaaaggcttgacattccgggcttttttgagggtgtttccggggtgggaatatcttattacattcctccccggtctgccctcttatttcgtaacatccagcacttcgggtcatgttggcccgaggcacagaaaggagggatctcttggagacagtacaaggatatgtgattttgaaagctgccacctttgaaaccggacacggctttgcgttggggcataatccgggagcgccgagcccctttgtgacctggcagtttaccgagggggaaaacggccatcgggattactactggggccgctatggaaccagtcaggcgtgggcgcagcgggactttgaccgccggatggacgactatcagcagctttaccatgcggcggtcaagcataccgagctgggaccggagggcgtttaccgctattattccacccagcgccccgtggacataggaacttacccgaagccgccggataaccagcctctttccatcgtcaactacgatgacgacaggcggcgtcctgtggcggatggcaggctgatggcatggggcgaactgacctacgcaaagccgctgaccgaaaagcagatggaggattatgaactgaaaccagcaccgggcaatcctgaccgggtgcgcccatccattaccgcccggctcaaagaaggagccagagggcaggaaccccaaaaggagcccggccagaagcggagccataaaaaccatgaggaacgatagaggaggatcgccatgcacgaaaaagacaactatctgaaaaccgccgagctctccacagagcagaactgcaacatgatcgacggcgtacccaacaacacgcccatcccacccacgcccccggagctggacgcaaaaccgcttgataaggtaaaggaacccaaagagcgccggaaaggccgggagctggaacgctgatggagaaccgcaagcggaatgtccatctgcatgtcatggtaacgccggacgagctggcagccatccatgagcggatggccgaggtgggcatttccaacgccggggcttatgtacggaaaatggctctgaatgggtatatcctgcacatcgaccttgcgcccgtaaaagagctgatctctctgcaacggcgctgttctaacaatctcaatcaggttgccatacacgcacatacctatggcgtgtacccggaggaaatcgacggattgaagcgggactatgaaaagctgtggggcgaggtgtcaaaggtgctgcgggagctctccgagctggtggcaaagtgagacgagggcggcaggcttccgttgtggggcttgccgccctcgtctttttattctcactgtattgtatgatagaaaaatttaccgcaatatggtaaaatgaaaatatctatcgaaagttggtgagatttgatgagtgaatatttaaatgaggatatatgccagtttagtaatgatgcttctgcatcttcttttggttggaattttcaagcaaatgcaggcatttttctttttttaaagtatatgccagatgcagcagatattaaaattgaatccatatctcaagatattgaaattactttgattgatgaacgaaaggtttttgcacaggcgaaatctgcacaagatagcacaaccatcaaagaccaaaaggaaaaatttaaagatgccataatatcgttagcacgtaatccgtataaagacaaccaattggtgtacatttctaatatacctgatacatttaagtcggctccaaatttttttaacaatagtattatcccgtacaatgattgcttagcgggaatacagaaagagattgacgataccatcctttcaatctcaaaaaacattgcaaaaaaaataaaaaaagaaaaagatcctctgaaaatcagaaaattggaacaaataaaagaaaaagttgagaatttccacaaagagaatttatatatatcaacaatatatccgtattacggtaacgaaaaaaacagatataccattattggcgattccgttttaagttttttgacagataccatcggattaacaagagatgatgccatttccataaaacaaaagttattggagcactggcaactgaattttgaacacaactctaccataaaagatgagaataaaaacaagaagattttgaaagaagattttacttggccaattgtagcttttctggttgatgggaattttccggatattgatgattgtttatcgtttttgccggaccagtctataaaaaaagaggttgaacgcgtcatgaatgatccgaaaagtttctatcatgcacgttacgaatttaccaacaaagtcttgcaacgctatgcgcaatttaaaaatcaatcaatagggaaagcaattaaaaaaccagaacttgaatttattaaagaacacggcgatgaatttagagacgaatttgtaatgttgagtaatggcgataatgaactaacagaatatctaacaaaagtatttttatatagaatacttacaagcaacagagtagtccaaaaggtatgtagcgcagtcggggtgaaagcatgattatagagaaacttctattacgagaaggtatgatagaaaatttagacactttttcagaaaagagaaatctgatttattctaagaccaacacaaaaggaaaatctacatttgttagacttctattttatgcgttggggtatccaattcctaatatgcgtggaattaaatatgaagatattattacggagataacattttctgaaaaagggcaaaaatatactgccactcgggaaaataatttgcttacacttttctccgaaaacagtcgcattgagttcacacttcccagtcaacatatgagttttttgtcgtttgtttttaaatatgaaaacatcaaagttttaaaaaatttattggggtttatgtatgttgatcaagacaaaggatggacacttctaaatcgtggaaccgtcattggaaagataaaatttagcattgaggaattacttgcgggcttaaatggaattgatatagatgatttgatcgaaaagaaaaccacactcgaactaaacagagacaaatatttggcaatgctgaatatacaagaattgagtgagcaagtttatgagcaaaacggagaaatattcatttcagacatagaaaaagaactcaacgaaaaaatagcgtattgtaacatcaaacttgaaaatgaaaaaaatgctttaaaagaaattaactctgttcttcttaaagaaaagcaattcttcgactatattgattcaatgaatttatctgtgaaacaggatgatgttataattccggtaaacaggactacattgctgaattcgacagcaaattatgaatatttacgagcgcacagaagcattatagtgaccaacatagaaaagttaaaacgtgaacgttcctcttatgacgtaaaactaagtgaatatcatgccaaaaatgcacaaataagcatgttttctgctgaatcaaaagatacccttgttaataagcaacttgccaattttaatattgatcagaccgtagttgaacagcttttagatgaaacaaagagcgatttgaagcatgttaaagccgaaataaaacgaacgattaaaaatcaaaattcttacatatcgaaaatttataaatatgttttagaatatgcaacccagcttaatgttgatgataaaatggtagccaaagaggatttcatctttacatcagacttaaaatcgctttcgggtgcagttctgcaaaaaatggtatttgctttcaaagtggcttttttaaaggttatagaagaaagcatggacacaaaattgtttatcgtattggattctcccaagggaaaagagttagatgatgacaatatgaagctaattgaaaacttagtaagcaccgaactatgcgacaatcaaatcttttttgcaagcatttatgatcttgaacatgaaaaactgatagaaattaagaatcgtgcaattgaaggccgaaacaactaacaaacagggagagtacaatttgtactctccctgtttgttaattgaggacaggattcactaatctttcgcaacatttatgtccccgggtaggcatgataaaatagagatagaaagaataaaggaggttttgatgatgaagatactgctgaaaatattggttgctccctttgctttagcgttgtcccttctggcggctctgctggtgttcctgtttgatatttgtgccgtcctgctgacgattgcctctgtgatcctggcggtgctgggtgtcgctctttttttcacgccgacgcccataggagggattgtatttctgttcctcgccttcctcctttcgccgtatgggctgcaagcggcggctggttctctgctttggtctctggacggaggcaagtctgctctgtatcggtttctggcaagttaagcagcctcgggccatgttggcccgaagtcggggcggtctggacaggccgcccttttttcatagaagggagggctgatttctggctaccacaactttgttgcagcgccatgcgggcgaaggcgaaacgattgccgaggccatccgggattgtctggactatggcaaaaatccggaaaaaacagaaagcggaaagtatatctccgcttatgagtgcgaccccgtcaccgtggcggacgagtttcttctgacgaaggccagctatgccgccatgacgggccgggaacagaaaaaggccaatgatgtgctgtgctatcagatacggcaatccttttatccgggagaaatcaccccgagggaggcgaaccgtatcggctatgagctggctatgagctggacgaaggggcggcacgcttttatcgttaccacacataccgacaagcagcacatccattgtcacatctattacaactctaccacccttgactgtacccggaaattccaaaacttttggggttccagcttcgctctccgtcggctctccgacagactgtgccttgaaaacgggctgtccattgtagagaacccgaagccccggagcaagggtaagtatcggaattatggagaatggcagaaagaacgaaaaggaccgctttcctatcaggacaggctgcgcctcgccattgatactgcgctggcggagcgtcccgatgatctggatgaatttctcaatctgatgaagcgggccggatatgaggtcaagaaggttcggggcggcggtatcagcttccggctgaccgggcagggacaggaacgctttacccgtctgcgtgcctccacgctgggggacggctacgacttgcaagatattctgaccgccattgagggcaaagaaaaacgccccggacactcggagcggaaaatcagtctggcggtggatattcaagcgaagctggctgccggtaagggaccgggatatgagcgctgggcgaaggtatttaacattaagcagatggctgctgcccttgcctatatacaggacaatggcctgaccgattatgagcagttggcacagaaagccaccgaggcagcagaccgtttccatgccatttccgagcagatcaagcagacagaacaggccatgaaaaccaatgctgggctaaaagccgcaacggttcagtatgccaaaacccgacctgtctttgagcagtataaggcgacgaagtacagccggaaatttcttgcggagcatgaagccgaccttgaactgtaccgggctgcacaagcggaaatgcgctctctgttgggcggagcgaagctccccaaaatggatgtgctgaaggaagaagaccgcaagctcacagcaaagaaaaaacagctctatggagaataccagaaggcacgacgggatatgcaggagatcgtcacgatcaaggcgaacattgacactttgatgggctacaccgagccgggaagaaagcaggaaaaggagcgttaaggttatgaaaataaggagcaaagcgacgctgacacttcgggccatgttggcccgaagatacgggtttggggcgagccccaacaagccgcctttgtgccacttgtggccacagaggcattgcttgccacttagcagcagcccctaaaatggcgcaaaaaaacagaggcccttattctggaacctccgtttctctggctttcttaatgccctcggctgtggcttctatcacgacaagctctttttcattcatggagtttagaagcacatcaatgtgctttctgcaagaacttgatcttgcgcctccgtccgcatgaataaactggtcaactgaaacgtcaaacatggtaatgagtttaacaaaaaggtcgaagctgggatattgacctttgttctcaatattcataatggtacgggagtcacggtctactaattccgcaacataggcttgtgtccaacccttttcttctctggctcgtttgagagctgctccgaggccgtgaaagtcaaaccttctttcatcttggttcattctcatatcaccctatatcattgtacatttcgggtcggattatgagaatgtaatgagattttacacaaagtagtatttcatttcatcaatgtgcagcctccaacttgtactattcgagataaagaactataatgtattctgtggaggtgcgaaatggactatatgacattgaaagaggccgccgaaaagtggggcgtgacacctcgacgtgtaaactattattgcgccggagggcgtatctccggcgctgtgaaaatggctggtatttggctgatccctaaaactgcggagaagccgattgatgggcggacaagacaagggaaggagctgcgccatgaataaaattttgattatagatgatgacagagaactgtgcgctttgattaaacgcagcgtacaagcagaaaacatagaagctgatttttgtaataccggaaaagagggcttgcagaaattaaaagagcaggagtatcagcttgtagtgctggatgtgatgatgcccggtatggatggctttgaaacgctggaagaaatccgcaaagagaacagcctgccgattttgatgtttacatccaaaaatgacagcatttctaaagtgcgtggcttacgggccggggcggacgattatctgacaaaaccgtttgatatggacgaactgattgcccgtattgcgtccctcattcgccgctacacccgctttaatcatcaagccggagctgtgcaaaaactggattttgatggattgcaaattgaccttgaaaatcgttctgttacgacggaaaatggcacttttgaacttccgccaaaggaatttgatctgctcctgtactgtgcaaaacatcaagggaaaattttgacaaaacagcagatttatgaggaagtttggggcgaagaatatttctatgatgacagtaacattatggcgattatcagccggcttcgtaaaaaattagaagtcaatccttcaagcccaaaatatatacaaacggtcaaagggattggctaccgttttaataaggaggtgtagctggtatggaaatcatcgttttcttgtccattgtgattgctgttgtggctgtattgacttccatcgttctcgttcggcgcgtaaaaaagcaaattgcagaaatgaccgatgcactggttgatgtgaaaaacggaaatggcaaccggcgtattctgtctgcaacaaatgaactgaccgcacctcttgcctatgaaatcaatgaaatcgttgtgtcctatgaaggcagactttcgattgtacggcagacagaagaaaccaaccgccagcttatgacgagcctttcccatgatgtgcgaacgccccttactactctgattgggtatcttgacgctgcacacaaagggctggtcacaggaaaagaccgggatgattatattgaaaccgcccgccggaaagcccatgatctgaaagaatatattgatgtactctttgactggttcaagttaaattctaacgagtttgctttggagatccagagtgttgaggccgcagagctgacaagaaatatcctcattgactggataccgatttttgaggataaacaggttgagtatgacattgatattcccgaacagcctgtccgggtaagattggatatggacagctatatgaggattgtcaataatctcattcaaaatgtaatcgctcacagccatgcagacaaaatcaaaattgccctgtcaaagaaggaaaataacatggagttgctgctggcggataatggagtgggaattgagaaggaagatttgaaacacatttttgaacggctctataagtgtgacaaaggacggtctgaaaaaggaagcggacttggcctttctattgtccatcagcttgtagaaaagatgggtggaagcataacagttgaaagttttccgggagaaggaactgaatttatgttgctttttcctttggagatttaagcgggttcccgtctttatggcgggaacctttgtcatttttgccggatttcaaattgcaaggttaatgcaaggttgcggcaaggttaatgcaaggttggcgtgatagaataccttacagaacaggaggttttgaatatggatacaaattacatcattgaaacaaaaaatctgacgaagcaatacggctctcaaaagagtgtggctgacttaaatatccatgtgaagcgtgggagaatttatggtctgttgggcagaaacggagccggaaaaaccactaccatgaaaatgctgttgggcttaacgaagccgacttccggagaggtcaaaatctggggaaagtctttacaggggaatgaaaagaagttgctgccccgtattggcagtctgatcgagtcccccggcttttatcccaacctgaccggcacagagaacctgcgtatctttgctaccctgcggggcgtaccaaacaatcatgccatcaaagacgctctggatttggtaggactgccctacaaagataaaaagctcttttcacagtattctcttggtatgaagcagcggcttgccatcgctcttgctgttatgcacgatccggaacttttaattttggatgagccgatcaacggtctcgatcccatcggtattgcagaagtacgctcctttattcgggagctttgcgacgcaagaggaaaaaccattttgatttccagtcacattctttcggagatttccttgctggctgacgatattggaattatcgaccacggcgcattgctggaagaagaaagccttgctgagctggagcaaaaaagcagtaagcatatccgttttacgctttcggatactgcacaggcggcaagaattttggaacgcaatttccatgaaaatcatttctctatacaggacgaccacaatctgcgcctgcacaaccttgatctgcctgttgggaaaattgtaactgcctttgtagaaaacggattggaggtatcggaggcgcatacttgtgaggaaagtcttgaagattacttcaagcgtgtgacagggggcgaaggaattgcttaaactaatcaaatgcgaatttttgaaattgaaacggaagaaatttattccgctgattattctggctgctttcctgtttccaatcccgctgacttatctgatgacaacgccttctatgatggagcgatatacggatcaggcagatgctttcgacggactttttaatatggtgttgggatatggtatccagtttttactgccctgcattatcggtgtgattgccgctatcctgttttttatggaacgcgacaacgatacattcaaaaatctgcgtacaattcccgtaaccagcacgcaaatggtacttgcaaagattattgtcctgtttctttttggaattgttttttgtgtggcttctaccattgcaacaattctttgcggatttggaacattagaagtttatggaataggctataaattgtttttagcagttgaaacaggaattttcattacggcaggaacactcccgttgattgtccttgttgtctttttcagtaagacctatgttttttccattttgctgtgtgtcttttacagcgttctgaacatgagtgctacggcattgtttgacacactgcctaaaaccatgttatggcttctgcccacgccactgactacattttggagtgcgggagatatggcggctcatggaataaaaatggacttggagcaaatgacagggctaattccttcaacatttcaagttgtattcattcttgggatcatggcattagtttcgttcttactgattgacagattatataagcagaggggggaataaacatggttcgcattgtaaaaacagaattttataaattgaaaaggtatcatatcctttgggcgggcgttgcgctcatgctcctatccgtcctgctgaccttgtttacctctatggcgaatgatggttccgtttgggatttcgcctatcttacagaacaggtcatcaaaaacaatatgtccatgatttttccgatgtgtatcagcctaattgctggatatatgatttctcgtgagcagacggatgacacattgaaaaatattctgactgtgccgatctcttttaagaaactgctgaccggaaaattgattgtgtgcggcgtattgtctattattttcgggctgatatgcagcctgtttacaatcataacagaaatgattgtgggatttcccggctttgaaatttccttagcactaaaagcgatcttgcagattaccgcggttaatttctttttatatcttgcggttctaccgattatcgctcttacttgtcggagggcaggtagctttttagtcggtgtaatcatttcttttgtctatggatatggagggatgtttgccgcaggaaatatgacattagcaaacctttatccgattaccgcaagtctcggaatggtaggctaccgtagctatgataccgcagtcaactggaatatcggaacctgttcttgcagtcttgtgcttgctgttgttatttctgccatcttgattttgtgcatgaaagagcgagaagcaacccaaacaaagaaaaaggccaaaaaggtagcaccaaagaaaggctggtgatgattttatgaagaaaatagttttagcattggcatttgttcttttgggaagttttatgatttctggctgttcaaaagatgaaattctcgatcattataataatatcgttcagtcggctggagccatagaacttacaggaaagttatctttggaaggaacaaaagaaaaagggattgatgattatacgggaacttatacggctgattatgagaatttttcagatacagagtatttgttcggaggaacttccataaagagagaagccggtaaggaattgtctattgattgcactttggagattacggaaggtactgcaaaagtattttggatttctggatctgatgaagcagtcactttgattgaagcaaccggaacttatagcgacacaattacacttcctgatggtggaaattatatcggcattgagtgtgaggactttactggaaacattgaattgaatattgaataacattctgccggacgacggcaaaagaaaaaaagccgtcgtatagcagacacatttccacgcgcctatgaagcggcggctttgattttcagagccgccgtttcttttcgtctactctaaaccaacgacgacctaacaccgtgtaaattcacggcggcatataggaggattgccgccgtgtctatttttgtcttttttcacagtacccatgacctacaccagctaaaaaaagcgtagctccccctccgggttattccggctatgtatgcgaaatttgttggaaccttaactatcatgtcatttcatgcgtccgtgtggcttcatgccgcccgggcgcttttgcgttcttatggggctgcttcgggtcatgttggcccgaagccattccccggtgccgctccccgccgccttcgtttcggtcactcgtcaaccaacaaccgaaacggaggtcaatatggctattatcaatttgcgggactattacccattctatacatcggattgcttcatggaagtatcggaagaagttgcagaaatgttcaaagagtttgatcgtaaagaggctgcgtaccggctgcgtacataccgccacaaagcctactattcccttgatcgggatgacgggctggagcatgaagctctctttgtcgccttatctccccatgaactgtatgagcggaaagtgaccatgcaggagcttcatgcagcgattgccagtctgccgaacaaacaggcaaaacggatttacgctcatttcattctcggcatgaccaaacaggatattgcccgggcagagggcgtccatgaaaaagtggttcgtgtcgcaatcgagcgaggtctgcggcgcttagaaaaaattttgaaaaattctttgtaaggcgtaccgatttaggccggaaaatgaaatggcttatgagaggtaaaacacttcgggtcacaatgacccgaggttcagacaagcctcatgcagattgaaaattgaataaaaagacacccggatacgaaggggaacgcgctgtgtgacagatccgccatgacctcggatttcagagaatacagtctttgtaaaactgagcgagcgaacaggtccatgccataggtggggcaaggctggctccaccggaacaggcgcagaacccggatacttgcgtttagtcacagtccgagcgttgaagcggccttgcaagccgtgagccgtcgcaggcaatgagaacgccttgccatcagaatggggagagttgaaatactatggggcatgaagcctatgtccgtccgatgtgtctgaaatgaagtgaaaacctatggggagctcccggcaatgctgtctgatgataggccaaccgatccggcgtggctccccatcttttcaaaaaaggagcactttatgggaaatgcgtttggaatgatccccggcttggaacctgacgaatggagcaatgacgcctgccgcggttatgtcattatggcaatggaggactgcggattttcaaagaaggatatacagcgtgttgtggggcagctttatgaagtatttgacctcaatagcgtggaggacgccaaagaaaagtaccattccagtccttactgacctcgggccacatcgacccgaagtggagaaagctcaaagggcggcacctgctgggtgccgtcttttgacatttccccacgggacaagtgggaaaggctggcatatacacgcactttcgcaaaggaggttttcaatgacgcaaactgtcgcttatgaacgagaaacaaagtctgtcgcatttcaagggaagatcattgtgctggaaagcctcacgccggtacttcccccgaaggagaaagaacagcgcagaaaagaaattgagcgttgtctttacgaggtgttcagcaaatatggagacagatttccctaatcattcgcaacattgttgtccggggctgctgatggtataatatagttgtaaggttggtagctccattccaacaaggaaaggagcccaatatggaatttatcagagaagattgtatttacgcaagacagtcagtagaccgcaaggacagtatcagcattgaaagtcagatcgacttttgcaagtatgaattgaaaggtgggagctgccgggtattcaaggacaaaggttattccggcaagaacacggacaggccggaatttcaaaaactgctgggcgaaatccgcaagggaaaggtccggcgggtcatcgtgtacaagctggaccgtataagccgctctattctggactttgcaacgatgatggagctgtttcaagagtacgatgtggagtttgtatcctccacggaaaagtttgatacttcgaccccgatgggccgggccatgctgaatatctgcattgtattcgcccagcttgaacgtgagacaattcagaagcgtgtcacagacgcctactattcccggtgtctgaaaggtttccacatgagcggacaggcaccatacggttatcagttagagcctactgtggtagagggtatccgtacaaagaaaatggttgccgaccccatagccgccgaccatgtacggctgatgtttgaaatgtacgctgaaccggaaacctccttcggagatattacccgatacttcgaggaacagggtatcaagatttacgagaagtcaatggttcggagttttctttcccagcttttgcgaaaccccgtttatgcacaggccgacttggagctgtacgaatttttcaagagtcagggcgcagcgattgtcaatgacgcttctgactttgccggaacaaacggctgctatctctatcaggggcgggatgtgaaggaggacaaggacaggtgcttaaaagaccagatacttgttatcgctccccatgaagcactcatttcctctgacacatggctgaaatgccggaaaaaacttatggcaaataccaccttccagcagggacggaaaccgaagaacacttggctggccggaaaaatcaaatgcggtcattgtgggtatgcgctgaaagccacccatgtgccaaacagcaccgggtatttccgctgtaccaaacggacggaaaataaaggctgtccgggctgcgggaaaatccgcaaagaagaatttgagcaattcattttctcggccatgcaggagaaattcaaagactttcagatactccacggcagagaggaaaaagtcaatccgaaactgaccgcctatcaagtggagctggcacaggtggaggcagaaattgaaaagctgctggatacgctgaccggagccaatgcgaccttgcttgcctacgctaacaaaaaaattgaagaactggacacccgacgccagaccatttcaaaggcaatcgccgaattgagtgttgaaaccatatcgccccaacagataaagaagttgtcctattatctcgacaactgggacagcatagattttgacgacaaaagaaaagccgccgatggtttgatctctacgatcaaggccaccagcgaccgtgttcagatagagtggaaaatctgacatttccgctctatcgcccctcatttctattttatcttgtttgtaccccttgtacaccgatgtttaagaaagctaatattaattggacagcaaggcagcttgctaaaatggtaggcaataagaagattacttttgataatgcagtacagagaggatatgtatgggatacaacgcgcaaaagcctgttaattcattccatgattgtaggatatcccatcccggccttttttgctgctaagaatgatgatggttatgatatgttagatggacagcagaggtcaagagcaattacagatttcttagatgaaaaatttgcgttgacaggtgtaccggaagtggaagtggagaacgaggacggtactacagagataattgatataacaggcttaaaattcgatcagttaaggcagtccattcaggacgagataaccggctactctctgactgtctattactttgatggaatcacagacgatgagatcagtgaattgtttttccgtctgaataatggtaagccattatcagccattgaacttaccagagtgaaatctaagtctatggaaacaataaaggaactgggacagcacgcattattcaagagtgcacttaccgaaaaggctatgatccggtatacaaatgaagatatcgtaattaaatcttatgctgtgcttcatgagccggaaccatgtcttgagacgaagatgattcgtccgctgatggaacgggtaaatttttcagaagaggacaggcagcagctgaacgaaatttacacaaggattctttctgtatatcagttggtggaagataagaaaaaaaccggaaaacggttattgaccagaacacaccttataagtgtggttccgatgatctggaaatccataaacgatggtctgtcagaaaagcagattgcagaatggatcagtaaattctttgcgggaacaaaatcggccagtatcagcgcaatttacaatgagaatgcaggatcaggatcggcaagaaaggaagcagttagaaaacgtcttgacgaggtggaaaaaagttataaagagttttttaagaatgttttagcggaacctgctaagattgcttaaagcagcagaaggcacttttgaatcattcatagtttaaaggtgcctttctttgaaatagatatagtcataaatctaacgtctattcaaaaagtactaaaagtaaacgattattatacattccgaggaggtaaactgagtagaagaaatgacgctcgttagatttagtacttataaagggggcggagattgtcatggagtttggatattgtagaatttccactaataagcaaaacatagaacgtcaagtaagaaatattaagtcagcgtatccaaaagcagttatcatcaaagaagtttatactggaacaaaatttcagggtaggaaggaactggataaattacttcgttgtatccataatggtgataccattatatttgatagtgtttcccgtatgagcagaaatgcagaagaaggctttttcatgtatcaggaattatttaatgagggaatcagccttatattcttgaaagaaccacatattaatactgatacatacaaaaaagcaattcagagtcagctaaacctaacaggcggacttgtagacacgatattaagaggaataaacgaatatttaatgctgcttgcgaaagaacaaataagaattgcatttgaccaggcggagaaggaagtaactgatctgcggcaaagaacgagagaaggtattatcacggctagattgaatggaaagcatataggacaactgagtggaagtaaactgattactaaaaaagcaattaagtccaaagacgtgataaaaaagtacaactatacatttggtggcaatcttacgaatgagcagacatggaaatatgcaggaatcagtaaagcaagtttttataagtataaaagggaactattggaagaattggatacatagaactgcagaggcaggggatagagaatgcattgcagaatcatataaagttactataatatagaagaaacagattagaggaaccgaagaagggggtataaaaatggggaaatatgattttagcagttttattatagaacctgatgattattcagtagttgaagatggaaaactgggggcaagaattgtattatccctgtttaatccgctgcttccggtatattataaaaataaagctttggatatgctgacggattttattgagagcagcgaaaatatctcgatagaaagcatcgattcaattagttgttcggcagcagcttacataggccgtaatattgatctgaaatgcaaatatgaggcttcgatttatatatggaataaggaggcaggatcggttgaagattatttgataagttatccaatactttcaacagatgaatattttctggagtttatagaatgcgtgatgggagaactgcgaaacatggtttttgatgaactagaatgtaattgaaataaatacagtttgaagctgataggatgtgcagttgataaaaaaattaagtaaaatggggatatgtcatactgcaagcgcatatccctgttttgttataaggcaaaattttattcaaattcaatttttccatgctcctgttcaaatttagtaacatggtttttcatgagtacctctaattcacgatttgcagagcgagcgttataatcggccacaattttaaacttttttaatagatcagcatctatgcgtacagtaaattttgatatgtcattagtcatatttaacctccatcttatatatgccttcattataatgtcaaaacgacggctaaaaacgaattgacggcatagtgacggcataatataattatgtacgaggaggaaataaaatatgtcaaatgttaaagaaattttagaaagggcaggtctggatagtatgattgcttgtctactagatgaacctgagtcagtaaagggagagatcgagatgagcgataatgctatcgaggacagctacacagaattcataagggagttagtgcagctttacccagggataaataaggatgatgatgaactgattgatgcaatagtcagaatggtagctatccatgaagaaatatatttcaaggccggtttgattgttggttcaagaattgcacatgaggtaaaagatggtgaggggactttgagactctgatagaacctaatgtatgagaagaactgtgtcacctggcacggttcttttttttgatggtgaatgagttcgaaaggtgttataattctagtgatgttttgaaaatttctgtatgagggtgattctatgaacaagacgaaaaatgtcattataagaaaaggggaatatgatatgaaagtaagttttagagaaatagatcgagccattagtgaatatccaaaagatacgatttttgtactggatcacgatgatgtaagaattccgctgccaactaaagaagaaattaagacatattttaataagaaggaggatcagaataagaatgtagaaagagaaaataggtagctgaaacatagaaattaaaatatatggctaaaaagaagaggactataatcaaatggaaattataacggagcggcttatactaagagaacctagaatcggtgattttgatcgttattggaatatgctaacagatccattggcaaagaaatatacaggtggagttaccaaaaaagattatgattcacgattacaaattttcaaacaagaaataagtcagccattatctgaaagcgctactgagttttcagtaatacttagagaaaataatctttatataggttattgcggatttcgttattctgatgaattaaatggtaatgagtttttatacggatattgtcaggacgcatgggggcacggatacggctacgaggcggcactcaatactctgaaatatttgttttctgagtttcaagctgatgaatatatctcaacttctgatccggccaatgtagcatctattaagattttaactaagttgggttataagaagatttcgcaaataattgacgaagatggagaaattgaactttttaggctgactaggaaggattataaagatctctatgaaatataaaataaatttaaattagagtgcaggtatagatagcaacaataataaattatgagtgttgtatatgtttacaactagggaggtgtagaaaatgccatataagccgcaaatttcacctaaactgtatgaattatggactaaaggggaaaaagaagagcgggtaaaactacttctttcagatggtagaagggttacgtgtaagtttgattgcctgacttatgccaatacatctgatgatgatgatgataccgatattatggttgcatctgttgattataatgataaatatggtgaacttcttgcagaagaggatatcgaaaaagttttgtgaagcagcacataattatggcgcgagatcaatgggcttgttccctagtagtttagaaccgatagcgatattagttatgggttacccattagtggcaaagctgaatgtaatatgccgaggagatgagaaagtggaaataccattttgggaagaaacatataaagatgatagtatccatacttttggttcggaaccaaacaaaacaataactgaatttgagcagttaataaaaaaaacaggaaatattcttgatgttggatgcggagatggtcaaaatgctttgtatcttgctaaacaaggatttttaaatatagatgcttttgatctgtcgaagaatgcgatagataaattgaggcgccttgcttataaagacaatttaaatattaattcatgggttggtgatttgtgcaggtttagttttactaagacgtatgatttagttttgtcctttggagccttgcattttgtggagaaaaaatattggaaggatttcattttaacagccaaaagtaataccagagttggtggaattcatatgattcagcttttcacgaatagtattgcggcctctccagatattgcaccttttgcagtaggcatagccgacgatggagaaattaaagaaatgtatcaagactgggatatattacaattcaagtcatatgtgtttgaagatgagcacccaggtgtaccaaagcatcaacatgcatcaaacaaaattgtagccagacggtctcaatagactaatcatagggcgaaagtgattttagtgtttcaccatatgaaaatcttttgtattgtatgcggttaaatgctgaggaagaagacgaagatatgggcagatatgagaatagagccagatgatattaaggctagtgatacggtaacaatggtgtggaaattgggagatgataattaaaagtatgttcaatggagccgtgctagtattggtatggttcctttttatatattataagaaacagagttatgtaaactagacgctcgaaattaacgaagagataagttatataaaccaattgcttgaaggaataattagtatatttagaattggtttatcagatacaaaccattaattataggcttagttcggtagatcatattgtccattgcaaaaagtattaaagaataagggatttttgtcaagagagcaagcggaaaagcttgtaattataggtgttcggtaaatatatcgaataaagaccagaaataagttatgtaaactaattcgtgaactgttaaaagcgtcatttcgcttgaatttatcagaaaaggtggcagcaggctcaaaaacattgtaaatacaaggtttttaagagaaagggctgctgttttgcagtttacataacgtgtgttcggtgataataattaaaatgtaaatgagaatgactctcaaataatcaaattgaatatttattttgtaaataattcggaggttgtaatatatgattcaaaataagcaataagcacatcgatatctgatatatttttcaacatgggtacatgaataaatagcattttcgtattaagattattttcttttatatattttaaagcattgaaatataaattgttgcaatatgaagtgcctggattttgcgatagttttatattatatttgccattaaaaaaatgcataatatcattaatcggatatgtggtaacaagacacatattttcgtattgtccacaaatctctatacatattttgttttttatcaatggtttttgaccaaatgcaaagatataatcgtattgatttaatgaaagaatcatttgctctacactgatatttttgttattttgcagataaattttatcatagaataaagagaacttatcaataaaaatctttgcactattattcgaacctttaaatcctgctatagctattttcaaaaaaataccgcctttcattcatataaaaaattcatcattgtgccatgttataaagtcaggcagcttatggtatttttcaaaataatcaagggcatttattacctgctctataggcaacacataagacaatggataataatcaagttgcccattggataatagaaaatccattgttttaccgtcattatctgtaccggtataatcagggtttctggaactaaatcctgcatcgccttcctcacgtaaatacataagccagccccatttcccgtgaatcaatgccatcataacctgttcatcttcagtgttaatccaaatttccttatattggtctttttcccaaacattcataaaattaccccatattaatatagagatccggtttataatgtgtcctagaatttatatttaatatctggcattgtcagcatcgtttatacccttcattattcaccatatccagacatgtttgtgttatatattctttatgtttgtactcgtatttttcaccataattttcagctttcgtactggtcagtacatctgtaaattccgtataaggtgctatctttttaacatattttgccagggaattatatactttagttaggcaatcgggtctttggatgtaaattttattttcatcataatatcccgcagtacaatatagtcttgatctccgaatttccttttttcgttgtgttccagcgacacctgtcggttcgttaacagtaaaagagtagcccgcctcgatgacagcattgccagtagcagtgaaacttgaatctaagcattctttcccattcacagtaagaatcttgatagggcctgcctctaaaagatgaaaatagtaagctgtacgacaaaatttcccgtatggggtaacaatagcgatatctttactttcaaagaccttacctgaagcaagatcttcttttatgatcgtacagcctgaattaatcgctttttgtgcaactaacaaaaagctctcatagtccatccaataatttatttgttttcccattttacactcatttcttgttttcatacatggctttattgctaattgcaactcttgccattaccttctcatatcccgtttttgctctcatacctacttatctttctcccagacaatcgtatatccaataatatcaagcacttcctgtacctctgtatactttaacgattcgcgttttaatttggcgctgaaattctgaaccgaagtatctcggccatacttaatatttagtagatccacaacctgagtcatggtaaatcctgattttattattgcagcctttagatcttcttttaaagccactatatcacctcaattcgtataatcaattacacagttgaaagataaaatataaagttgataaataaacttgacaatataaactttgtaatatataattcaactgtagagttaaaaagttatttacatagtaacatttttaaagaaaattgtaaatagcgaaaaaacaaatatatattctgaaataccattgacaaagaacacacgttcgatatatactgtacttacaaaaacaaaagacccgtcctcaagcggtgttggagcaccttggacgagccttacatacttattagcaagaatgcgtttggagacgcgatcttgcaatgcatagtagaaactatacgacaacattatcacatatgaatatcttttatgtcaagcgtttctgctattattccaaatttttaccataactgtataacctgtaattcttattattgaaaaataatagggcttattaaatgcactctgataactgaagaaaggggagatatttctattgaacgatacatcataatatttttgtaggctggaaggcctatatatttttactgtgaatcatagttaaagtaagcaacttaattaatgaaaggatgatggaaatgataacgacggttaaagatgtaaatttgcgtttagcggcaaatcggagaggatacatgcttacgaaaagaagggaaacgaagtattcaccaggacttggaaatggatacatgattttgagcctacttactggaaatattgttgctggagaacgatatgatatgacaccagagtccgtgagagactttttgaatgaacattaacagaaagagggaaaaaattatgcaaacgattgagagaagttattcggttaaaaaagttattgaaagtattacaaatgggtgtattgtatttaaccaccccatgcaaagaaaacccggacagtgggatgacgagcaacaaagtcttatcgttcatagtattcttggtggatatgcaataccacaaacatatgcattacccattattgatggggattttgattctttctctattcttgatggaaaacaaaggttgacaactatatatgattatgtaaacgatggcttttcgttagctgatgatacaccaacagttacacttcagaaaagaaaagtaatcactgataatgatggaaatcgccatttagagaatgctgttgaggaatatgatatatctggaaaatattattctcagattgatgaaaggttgcaagataaaattatggatcatgagatttcggtgattatgctggttaattgtaccgatgaagaaattgaagatcaattctatcgattaaataatggtacagcactaacgaaagatcaaaagaccagagttcttcttggagatgagcttgctgcattcgttgatattcaagagcagaaagatatttttaagaaaaagtcgtattttacaaccttgcagagaaagcgtggagaggttcaaacctgtattttacagactttaatgttagtaatggattttccgttcaagaatttcaataatgatgctgtaatggaattcgcggaatggttccggaaaaatcatcaaatgagcgatctggactattgttcagacctttttgacaaactaaatgaagctatagccattacggataaacctaacaaacttatgaaaaagattaatattccgatactggcatatcatgtacaaaccgctgatgaaatcgggatagatataaatgcatatgggcattggattactggatttttttctacatatacttcagatagtgagtatgcatcatattgcggacaatcctccacatcaaaagccaaagtgaaagctcgtttagactatgtagaaaaagaactgagaaggctggttagctgatatggagagagaatatagaattgatcctgatcttaacaaggttttaccggaactatcagaagatgattataaggaattagaaaatagtttgttaaaagatggatataaaggtgcgcctatcatgatttggggtaatcttattgtcgatggacacaatagatatgaaatttgtcagaagcataatataccatttgatgtaaaggctgttgactttagcaataaagaagatgctattcaatggatggttcgccaacaattaggaagacgtaacttaacaactttgcagagaatagcaatcgtagagaaataccgccccatatacgaacgaaaagcaaaagaaaataagtctaaaagtggcggtgatagaagatcggtttcgcagaattcttcaacaccgatttctaacaaggataagattgatgtaagggcagagtgtgcgaaagatgcgaatacctcaacagatacatattcaaagggtgttaagatacttaattccaataatacagaactgattaatgacataaatagcgggaataaatcaattaacaaagcctacaaggaactgaatattaaaagtaaaaatacaaatagtctctccaatatagaagggttatctaataagcggaaggctgcaagtggtgaatctaaagctgttcagaaacaaataaatttagaaacaccgatttcggaattaaaagaaagctctaagtcaattcaaatcatcaatgaatttgatatatttgaaataaaagtccattatgacgattttgtaaaagatatgaactggttgactacaaaaagcctaattaaagaagatgaagaagtagctgaaaaaatatattccgatttaagaacatgtgttgataaactggagaatataaaaaatatcatcgaagatataaaaaatgaagtgataataacattataggtagcatttgagcgttgaatttcacattaaaacaaatctaaaggagaacaaacactatgagaaagttacacgagatcacattacaccagatgaaggaagcaacaagcggcaacacctataaggtggagtcaacggacacaaacgcaatgtcagtatcgttttacgacgcagtggttgagatcagcacagaatttaaagagaatggcgaaatcattatacataaaccaggtacgctatgtgaggccaaacttgattgtgaggacattctggaaggtattgagacagacgatgatggatatttcatactttatttcaataatgaaatgtcggatattgagatcacgcagatgaaacggtaaaatccgattcatttggagaaaaagcattatagagatttagcagacaaatcactgcttatctatattgacgggactcatgataggatcagctcctatcccatcaaatactattgaccgggagttggtgaaaggccgattcctcaaaaaagtaattggaggataaaaatggataattttgagagctcacaaaagcaggtattgatcgcgccatatgacacttataagtcagatgagcctatgcacaaagaattcatttccagaatcgacttcataaatcgtacaggcatttttgtttcgccatcatattttgatatgatttacagtgcatttaaggagtctggggtggccgtagatgaatttgtacgagattatgaggctaaatattcgaactgtattatgaaaacaccactttctggaacttttaaatatgaaattcaggatgatgatgtgagctgcataggtatttataacgattttcacgagcctaatatatgggagattatcaattcacttgcaatagcatattttgaggaatggaaatcaaaaggtgatatcactcgggaatccattaaactgttggataaaatgcagaaggcaaatgaagaattaattagtatttataggcaacaggaactattaaataaggaacctaacacaattagacagtaaataggaggaggacaattatgtttaatgaactgaaagcgtatgcaaaagcggtaaaagaagatggatactttgtaatggaaacgacgtaaaaacgccgattagcccatcgagatggaagtatttaaatatggcggtgtacgacctttatcatatgccgccattaaaactaagataggaaccataaaacatatatgagccatatgacggtaagacagttccgattatgtgacggatattcggtgataaaagttggcggttccgctaagaaagtcggattaaggattcgggagttggaaaggatttacggagtacgagaaggtagttctaataaaaaggggataaatcagtatgttggtgagccgaattattcggtagcaacaaaaacaaatttaaagaggagtcttacagatatgcaaaattttctaaagctcggtgagacgggcatgttggattatccgcaattgacctatgcagtttatcgcaattttgcgttttactcagaagtcacagtctttataaagggtacgaaaacttttaataccctttatatgtgagtaggtgcgtcatattctctgtaccttgttaaatctgcatgatgtgcagtttggaatattcagatgtgcataatatacacttccaaaatgtggactgtatttgaattagcacagtgtagttttgcgttctattcaagataagtggttatgaccaactatctaactgaagcccatttgggtatgagatcagacacaactattttgttgtttcctatatataataaccaataatcaagcaacctcaccgcttagctggattcaaacaaacctgtctgtggagagccatatcatagtaaaaatctaaataaaaccccaacagtgatcaaaactgaataattgaggaacttaaacacgccaaaagtgtgttgaggtatttttgcgttcttttttagaagcttcggagaataaagacagtagaaggacagagcggaggttattataagaccgccgtatttaggcggtaagttatttgatttaaaggaggaaaagattaatttggatttcggtaatgaggaaatgggataagtaacgagatgaagaaaatgcaaaatatgagttcttaggtggagaatagtacaagtgaggaggagctgacggtgacaatgaaagaacaggtaacaaatttattaggcggatttttagagaaacacaaagattatgcgattgagatttatttatgtaacggaatttcggatagccgtgttgcaaggctttttgtgaccagtaatagaaaatttgaagtaaaagagtctaaatgcattgtagaatggcagtttggagaaattgactcaaatgatattacattcccatatgatgaaattctggactgctatgttgggtatttagagcctgatatgaggacgatgttgttccaagaggatattatagttgcaatgaaaaatggcatgaaatatcagtttcagtgtgttggaataccaggatgatgaaaaaagtcaatgcaatttaatagaacaaatagttacagagatatattggcggtggaagtagccagtcaatcattggttgtgagtgattacctgttaaacggaattacagtctggtgaagatatcagaaaccgatagaggacgaaaaacgctcagtgatgctactgagtccctcagaggacggaataacatatcagtaatgatactggttgataatatgggacggaacaacaggcacattgcttataggggtggtgtgcctgatgaatggaggaataagattatgagtttagaaatgaaactaaatcctatccatagtaagcgattagcgggatttttgttaatgaggggatgtagattggtaaatgttgaaaaagacagcgaagataagtttgtcttttacttcaaggacacaaagaaaacaaaagaacatattaaagttttctttggcaatacaaaattgaatacgagtggggaggaatgagttatttatacaggaactaaaacacaaatgtacatagtacggtcattggcaatgacgaattggttatgtaataacggattcaaaatattaaaagtcgaggattctgaaaaggattcaagattcaaggtgtttttatttgaagatacagccgagttgcaccatatgatgatgttattccatagaggagcatgattatatggcgaatggcaagcaaagaatttattttagcagtttgataggtgataagtataagatctggaatgcagagaaaataattttagatggtggaacgggaagtggaaagacatattttattcaaaatatattgattccatatgccgaacaaaaaaataaaaatgttttatacctatgtaatcgtagacttttatatgatgagttattgccagaaatgtcaaaacataaaaatgtaactttgatgttatatcaaatattacaaaagagtttaaagaacaacacaattatggataggtatgatttcgtgattgcggatgagtgtcactatttgtatagcgatgcactgtttaatgaatatactgatttagcatataagtttttattggagcaagaaaataatgtcgtgatttttatgagcgcgaccgcaccaactttttttcggaatttacagcaatttaggatagtgaagggaactaatgtctttagtatttcaaaagactattcgtatgtaaacagtatttatttttatgatgcaaatgatttggtaaatgttattgatgacattattcagaagcacccgtacgacaaaataatggttttcgttaatagcatggatagactgaaagaaatgcatgatatttatgaaaatatagcttacttcatgagtagtaaatcaactactagaaaggatattatcgaactttgtgataatggttgtattaagcaatataaaccagattatgttacctttgatagaaagatattatttgcaactaaggcgcttgataatggggttaatataaaagacacagctattaaacatatctttagtgaaatatttgatattgattctgtgatacaggccataggacgaaagcgctgtatggggatagatgatacgtgtaatttttactttaaggattacaagaaaaatgcattggatagatttttggaattcaacaatgaacagtatgaacctgtaaagaaatatttacagagtaaaagtgatttcttggaagaattaaaacgtgacaatgtagacattagagaatttgcaagaaaaaatagaatcatgtatacagactggaatgataaggaacagattcagattaacaatgttagataccaaaaatatagaatggatcacaatattattaccagtatgaagacaaattcctatcggacagtcctactcaaatatttaggcagtgaattaagtgataagatgaaagagttacaaataataacatcgtctaaggatatatttcttgaatatataaaaagtatcgaagggcggaaattatttaaagaggaacagaaaattctaaaagccaaaatgcgtgatctgttaggcttaaatgataggacaatgggaatcggtgtgtgtaacgggaaattgtctgattgtcaatatcagtacaaaattatatcagagaaagaaaattcaagaaaatcttcaaattggaaaaaacgatattggatgataatttcgttgaaaaagaataaaccgccttaatactaaattaagtttgaccccaaatcaagcaaatcttctaatatataaagaattgctcattttggggtcagtagatgttaattaaattttgaatattacttttgtgtagccccatagggcggaacaaaagaatttattcccgctagggaattcacttattgtaagaggagattgcttcatggatagaagttacaggttaaagatggaagagaaattgagtaagaatattctaacagttgaatatgtattgaactgtgctgctaagcatgaaaacaaaattaatcagttagcctataaggaaaaacagtatagaaacgttggatataacaattttaaaagtcaattaaatgaactggttacatacagaaaaccgtttattgacatcctgatgaaagggtatcacatgtcactggatgatataaaggattcattttgtaatgtaaaggaaaagaacataccaactaaacaagtgtgtgaccgtataagggagataattgtttctggacattataagcttgaatgatgtggtgggtgccttaaggcacaatagtatttgttctggctgcgcctacacaaatattgaatttgggagtatgaaaattgaaatgggggaaagcaggttttacgatagataaattgtcactgaagagacagagacaattcagttcatcaacaagctaaaggaagcgtggaaagtgcagttatcttttggaattaggttgtaactacaatgacagtttgcatttagagaggagcaaaaattgggtaatattgtgaaaagcgaattaacacagattgaaagtgaaattctttcacttaggaatcaggccgcgcagaatcttataaagattggcctaaaattgattgatgcaaaaaagatgattagtcacggagaatggggagaatggttaaatgataaagttggatttagccaaagaactgcaagtaatcttatgaggattgcaaaagagttgggaaattcgcaagcgatttccgatttagaggcaactaaaatttatatgctcatggaattacctgtagaagatagggaagattttgtcaaacaaaataatttgaaaaatatgtctaccagggaaatgaaaaatgttttgaaacagtataaacgtaaaggagaaggaatttataaaataattgacagagtaaaggatgaaaattgttatgagattgaagttgataaattaaaaccatttccaaaccatgaaaattacttttgggatataaaaggaatggattatgtaaagtttcttgaaagcattgaaaaatcaggtgttattcaacccgttctaattacaagggatagtatgattatttccgggcatcaaagagtaagagcctgtaaggacttgggaattgaaactatatcagcaaattatatgttttcggagaattgtatgggtatgtcactggatgaaatgttgttagattgttttattacttctaatatgcatacaagaagctgtgttttttatttggcgttagcatggaaaaatctgttttttgatgatggctctaaagtagatgactatttacaaaaatttattgagtatgacaattcagagtataaccaatggttagaggaatcaaaagtaaaggttaaccagatgaagaaaagcggaggctataatctcaaaaatttaacttagtaatggagaactaagtaattggtgaacgagatttagttctccttaagagcaagggggggagagggatttttatttccttataaaattatagtttgattaacaaaaataatagctttggcatgaggctactgactattagcggatattaaaatatacacaagggaggatttttagtgattgatttaaggccgcacaatgaagaggcatacaaaaaggtaacggagatgattgctgaagggaaaaagcggatcgctatttctcacgcaaccggaactggaaaaagttatatcattgcacaactatgtgaagattacaaccaggacaaaaagcttgtgctggttccaagcaattatattatagaacagatggagaagttatttttgaaatatcatattggaaatacggatttcatgccatatcagaaattgatcaaaatgtcagatgaagatatagctgctatggattatcagcttattatattggacgaatatcaccacaatacttctaaagtatggggaagtaaaattcgtcatttgatgaacactcatcctgatgctgttatctttggcacgagtgcaacgcctgtacgatccgataagataaatacgattgatgcattgtttgatgggaactgtgccagtgaattgcctctttcacaggctattgcgaagaagatcgttccattgcctaaatatgtagctgcattatatacactggacgatgaactggaacgactgcgagaaaaagtggatagggctactaatacaaaagaggagaagaaagaattctataaaagaatcaatgcaatgcgtagccagattgaaaaatcgtatggtatgccaattattttaaataaacacatcaaggataaacaaggtaaatatcttgtgttctgcaaggataagaagcatttagatacaatcaaagatactgctatagaatggtttaaaacggctggatttaaggatattcacgcatatacagtatattctaaatgtgcacagaagaaagcagaatatgatgcgttttgcgcagatacaagcagtagtttaaagcttctattttgcgtgaatatgttgaatgagggtttgcatcttgacaatatctctggtgtgctattgttgcggcctacgtgtagccatattgttttcacacagcagatcggacgtgcaattgaagcaggaaataaggaaactcctatcatatttgattgtgtaaataattttagtggtgtaagagacggaatgaaattgcttatggaaattaaagcggcgattagaaaagaaaaaggcgagaatccagcttttgatgaaggatattttattgacattgatacattctttattacggagatggtgcagaatgtacaggatatgtttacagagatagagagggctttgggtggaagagcttggacagagaaagaaattaagatactgtataaatattttccacttgaaggaattaaaattgaagaacgtttagaaggaagatcgagaactgcaattttttcattggcatcaaagcttggcatcaaggcccctgattcaaactggactaacaaggaaattgagttattaaagaaatattatcctaagtatggtattaaaacagatcagtttataaaaaataggccaatatcatcaatacgagataaggctaatagtctgggaatatatgtggagaaagttggaattttcactaaagacgaagatggtattattaggaaatattatccagtagaaggtagcgatgtatacaaaagattaaaaggtaaaaacggaaagcagtgcagaagtagagctggaatcttaggtgttaaatttcaaaacataagtaattggactatagaagaggatgaaattattaaaaaatattacgcatctaattctgaaaaaataaaagaaaaattaccaaatagaaatgctctgggaataatgtcaagagcttcaacattaaaaatacgaaaaaaagctctaaattggactttagaagaagataatataataaaaaaatattatcctattgaaaaaactcatgtatgtaaaagattaattggtagaagtagaaattcctgtatggcgagagcaagagtattaggaatatctgaaaaaggtagcaatgcatggagtgataatgatcttaaactattaagagagtattatcctttaatcggaagtgatgtttctgaaaaattaaacagaacgaaaaattcttgtatggctatggcatctaggcttggaattaaagccaaagaaagagcagtaaacattattgatgcaaagagcaattctatattaggcacatatgcgtctagtattgatgcaggcaaagcgttagtattagaattccatgttcttaatgactataaatcttgttgggtagcaatacataatcgattatcaggcaaagttaagaatccggtctataaaggccgttttaagtttgaatatgcggatataaaagatatatcacaacctgcttaaatcgtcgtatattacgcagattcagtctgtaaagcattagaagataaaatgtatggctgatactaaacaggcggaatctgtggtgtgcagcgcgttttaggtagttttagaaataattaacgtcccccgttgtgggggcgtgggatatggaggaaataaatataagcggattaagattgagaagatacagattgtataatttatcaactcacgattgttttacagataaagagagagctttatataattcgattagtaaatctcaggaaaaacagagagaaacattaaagcaattgttagaagaagaaattgaaaagagtaacggtaaagtaagaatagttcctgctaaatgtactcgaaaagatgataaacccagagtagataaacaaattgctgcctttgaaaatgaagtatgcagattatcagatgattttaatagttttacttttaaagaatttactagcgatattccatttgtaaaagaaattgtgatactggattgcaaccatgaaagtatattaaagcagatcataaaaaatggggttataattgataatagggaatttatattttatgcatcatcaacaaatcaacagaaaaataaacagatctgtttaatggataaagtcttttataacaaaaatataaacaggcttatgtgcggtctgacagtagatataattaacagcaagggtggtattaacgcaggaaaatatcttgcatataaatctttggtgttttcaaaaagcattgaaatggatacaacaattctgatagacgaggttgttgttatgccagagtttgaaaccatggtaaatgcagaagttaattacttagatatggatacattaagtattaatagaaacgcaatgaatgtaccagttaatcacatggatggggcaggaatgttcattcctggagtgtttccgcaaagctgtcaaatacgtggaggctggataaaaggagctgttttcccatttgattttaaaaagttcattgttgaaagcgagagtaatgggaaattaacaggacaagagatgataaaggatttatgggggaacgaaattcccataaactttattagggataatgtgaagctgatacttaatggaagtcagctaaaaatgtggaaatattatgactcttgggaaaattataaaaaagcatttacggataatggattgaaaatttgcattaataatattatgcattatccaaatgcagataatcctattactaagacaaattatcagttttatcagtcgcttaacagaaaaaatgtgacggatgaaaagatagaaagactatgcgagagaacaaataatatgattaatggagcgaagtcgtctcctgacctggcattacagttaattggggcagatgatagtaggacagaagatttgaaaccgttatatgctgccataaaattgtatccagcgatgcttcaatcagattttgtgaagaaaaaaataaatggtgtaatagatgccaaaaggaaaatgggacaaggtgctaaacccttcattagtggattttataattacatatgtccagatttatatgctgcctgtgagcaatggttactgggggaagctgatccaagaggtttgatacccgctaaccgcgtttataatgcattctttaataataaggctgttgaagaggtatgttgcttgcgcagcccacatttaggcgattcagaacatggtatgagaacattgattaaatcggaagaatgtagaaagtggttttcaggttatgatactgtgataagtactcatgatttactgacgaagacattgcagtgtgatgttgatggggatgaaatgctaataacggatgatagagcatttattgatttagtggagggggataggccgcctttatattatgaaatgaagaaagctgataaccttacgatagatgattcagaaatatacaattgtctgcttaaaagttttagtaacattaatataggtgacataagcaatgccttgaccaaacattacaatatggataaagagccggatttaaattttatccgagttctgactgcatataataatttcataattgattatccaaaatcgatgtatttacccaatataggtgtttacgaagaagaatttaagcggttaagcagtcgaagtccaatatatgttaagttcccgtacttctttcggtatgcaaaagaaaagaaagctaatctgtgctttaaatatgaggagcaatcaaagagtacctgtaatcgcatcagtaaatgcatacaaaaaaatactaatagtaatgggtacaatatttggataaatgataattctgggggacaggatagaagagataaattcaatcctttagtattacaaaatagtgaaattaaggttgatcggaattcaatgaaatatagagaacttattaacgttcttagggaattaaagaaaaaaggcagtgatagatataaaagcaagctgaagatggcatacaaagccctcggaaaaacagaagaatatatgaaagaggctttgtattactatttatgtagtaagaacataatggatatttttgagaatgatagagaaaaagcagcagcgtacttgacagatattgaattttaccaaagtgaatttatttcatcgaacaaagatattttgtggaatctttttggtgacatactgttgcaaaatttaaagaaaacactaaataaagaaaatgaaaccccatttaaacgtactgcttacatgaaccggaatcggaggactcaggagatcgaggcgatagccgctaacgttgaacaagatatagccaatgcagaaactataggtattacaagatctgatttgttgatgttggatggtctgagaactagaaaaggttgtgaaaacgacaaatatattctttatattctaatatttttacaaaaatgtaagttagcgtggtgcatgttacatggaaaagagaaaactccatgttcaatgttttttagaatttataagaatgtccgaaatggcaggcttatcacaaggagaaccttagatagatggattgacccagatataaagattgccgataaagcattaaaacgattggaaaaagctggatatattcggatagatagttgtagaaaatatgacaagatttttttattacattcggttgatcaaagtaatgaagcagtttttacagttagagggggaaacccaatgattccatattatgaatattctggtgataggaaaataaaatcatgcgagatatgtaataagaaatttgttgcaaggggaaatgctaaaacatgcagcgataagtgttctacgtatcttgaaaagagaaataaaaataagcagaatgattttgaaataatttaggagatttaaaaaaattacggtgcctgaaaacaagctgaaatgctagtattttaggcactttttacggtgtgaaatgaaatttatgaaaaatgagaatttatataatgggaaagggcaacacaatctattttgtggattttccaaaaaatattataagggagtaaacaaatgctcaatgaacttgtaaataaatttcttgaaggaaatggtatatcaattagattttttgcattaaaaataaattgtgaatatactaaatgtaccagatggctaaagggagaaaaagtttatttgaataaggaacaattgaaaaaggtgcatgaatttttagcaggtaaatacttaaaaacattggaagagattgtaagtgaaggaaaaggtgaataagtatggttgttgtagaattggacgacgcaatgtataaaaatctgattcagatactaaatgaaaaattttactcgacaacagaccttttagaattggcaatgattaataatatttataaagcgttacgatttcactcagaaacatggttatcacaactgaataattaaatatattggaggaagatcaaatggaaaacacagcaacggagaatacacaggaacttagcagaaaagatgtaatgaggctcctgcttgatataatgccagatggtgaagcaggggcaatgttagcagctttttcttatttggacattcaaaagttgtttaatgagcctgagacactggaaaatgtaaaaggtcaggtaaatagtagtatcattacatatgaattattgcttaatgcattaaagcgtgtaccttcactcgtggataataaggacgaactgttgcaggattatgctattaatcattataacgaactgtcacgggagagcaaacgggaattttgtgtacacatgatggatcagtatgattttcagcgagatctctgtgatacaattttcgatgaagtagaaaagcagattccagaggtaaagcccattcttgacgtgctgaatgtgaagaaaaactttctatcgatgtatgacaatggtggttatcataagtacgaggaaaaataatcgaactggtggttgctttggcattgcgtgagaaggggaactatggtatgattggaatgtaagaggaggggtgaatatgggtagaaagataatatgtactgagtgtaatacaatatttgatgaagatgtactaaaagctaaaagcagtgaaaatacttgtctggtgtgtggatctgatttgggtggaagtaacacagtgggaaaggctttagatgcagataatgtatgcgaaacattctattttgattccatatttaggttttcagacgaatcagaatataattctgtgaatgcatattgtataaagtgcggaacgaacaattcattatcattagataagtttgatgaattagtagacaaggaatatgcattgttaaaagaaggcattacagtcaagtgccgagggtgtggtaaagagcatacagatcgaaagattctatataagcgaaaagcccactacgctacagcaaatattcccaaatgccctatctgtcaatcaacaaacttaaagaaaatcaccatgggttctaagctctttgcggctggaacaataggtgttttcgcattaccacataccagtaaaacatatgaatgtaaaagttgtggatataaattctaagttaaaaatcggaatatgcattgtaagaaaataaaataaaaagtcaacaaagggcactcagaaatgagtgtcttttattatgcctaaaaaaggagcagttaatggaaaatcaatttatgattaagttacaagcagcacttaataaagcaaaaagtattttaaatataaagaaagacataaaagatatagaggcaaaattacctaaacttaaaatattaggtgcactagattccaaaaagacacaaaaagatatagagaaatcccttaaaacggtaaaggctcaagttattgtagacgctgatactacaaaggccaaaaagaaaatcgatgatttggctaagaagaaaaacaaggttaaagtagagacttctatagataattctgatttgggtaaagggcttaatgaagcggaaaagcaaacaacttctttcttcggaaaactttcgaataatctcgctggattaaatgttgcgcgtgtagtatttcagcagatagcacaagcggcaaaagaggctattgctaatgtaaaagaattgaatgcagcaaagactaatattcaaatggcatcaggtgcaagcaattcagaaattaatggaatgatgaaatcttacaatggattagcgaaagaaattagttcaaccactaaggctacggctgaaagtgcaaatgaatttatccgaatgggtgagagtgcagagagtacaactacccttatacgaaattcagagatgttagctaagattggaatgattgaatcgggtaaagcagcagaatatcttatttccgcaatgaaaggctataaaatttcagcagatgattctataagtattaccgacaagctcgtgtcggctgatatggtagcagcgatttcagccaagggacttgccgaagcaatgtcaaaatgtgcgaatattgctgattcgagtggaacgtcaatggatagattgataggatatgtggctacagttggtgaagttactcagaagtcaatgtccgaagtgggtaattcgttccagtctatctattccagaatgaataatattaagataaaccgttgggtggatgacgaaagtggtgagtccctttccgatacggaaactgtgttggataagcttgggatcaagctacgagatacagaaaatacttatagagattttgatgatgttcttgatgacattggaaatagatgggataaatttacacaagtagaaaagaatgcaattagtgttgcaatagcggggtctaggcagcgcgaaaatttcgtagcgctaatgagtaattacgctactgcactaaaaatttcagaagtatccgctaattcggcaggcacggctttagagagatacggaacctatcaggactctattgctgctaaaaccaatgagctaacaacggcttttgaggcattatcaacaaatacaattagtgaggacttatataaaagtattttagaagcaacaacgggtattgtagaatttgtagataaaacgcaattgttaaaaggtacgcttgcaggtatggccacatttggtgcagctaagatatttacttctatgacagtgggtataattgctgcggcaaagagtacggcgcaacttacggcggctatggcgttgtttaataacggaagaagcgctgataatttaacggatataggaaaagcatgtattggattgtcaaattcacaattaaaacttgtcttatcgaccaaaggattaaagaacgaacagagatatctaattttagcaggtatggaattaaatgaaacacaaatagctgaaaaacttaccactcttggctttgcgcaggctgaaaatacagcaacaacagcaactttttcatttgcaggagcgcttaatactttaaaggcagcttgggcttcaaatccaatcggattagctattatggcgatcacaacggctgtttcgataggaacaacgatgttttcaaaatataaaagaactcaggaagaaacggcagaatcacttaattcttctaaagcggcctatgattcacttacatcggaaattgaatctcttaaaagtgaactagattcctgtgaacaaaagatccttgaaattaataagttagatggtgcgaagtttgcaaaagatggagaattagaaaagcttgaagctcaacataagcaactggaggctaatcttgctttagttaaagaatcacaataccttgcagccaaggaacttgccaataaggcagaagaagcttttgaaacgccagtggtatcggaatttaaaaaacagaatgcggaagattttgatggttacgatcgtgctatgggtggaaaagtctcacctgttgtagaactagagtatgcaatcagcgagtataaacgacttagtaacgaattcgatgaaataaatcagcaaattattaataaatcagcagagataaaaatggctcgggctaacggtttagataccagttggaaagaacgtagtcttgatttattaaaagatcaaaaaagctctgttgaacacgacatggaggaggttcgtaaaagagcaaatgaaatgtctggcatagttggtagtgttgttgatgctgataaagctatcttagatttaggatatgacttaggagataagcaaaaagagaactttacagaagcaaaagattctattcaagaatataccgattttgtaaacaatattaaaatttctgatttaaaagacgaagaatctgcacagcttgatcttctaataaagcagtataatgatttgaaagcggccagagaaaatgccgctgttgctttggaaggtaatgttgatcttaatcatcgtccaatacgtgtaaacgaagataattccttctctactgttgattccagcaccttcaatttcactgattttggaattaacaaaaaaggtgcttttaatgtaactcccattcttcctaatggagaaactatagataatcttgaagattatatttacgaaaagcttaattctggaataaaattagaaaatcttgatatttttatgggatcattcgattctcttgatgaagcagaaaaacgtgcacagaaaattcatgacgaacaccaaaaggattaccaagaagaagccaatcttcttttaagaataaatgatctggataagcaacgtttagcaaatcaagcagagggcagtggtatttcagtttttagcatacaggacaaagatgctgaaaaagtaattgacaattatcagaaacagttttcagctttgtcagccgctatggataaagtgaaaaataaaacgcttacaggttctgaattactcgatttacaacaggaatttccttctttagttgattcagcaggtgatttgtcattagcactcaacaatttagttgatgatacattggctcaagtaataaaataccttaatgattcgggagctccggaaggtcttatagatacatttaaaggtattgctgatgaagctaaaagaacttcacaatccattatatcatttaccacgattttctccacgctacaaacagataaacttgaagaatatgttgcattaattaaaagtggcacaattgatgagaaatcgatctcctcatactcggagctgtccaaaataatgcagcagacgggaatttcagcaaaagatgctgtcaccgccataaaggaattttcagatggcttcaccctttccaaagacttaatctccggtattcaggatggatataatttaatcgaatcggctaaaaagaatattaaggaattaaaagttattagccttgatacgttaaattctattaccgcaaagtatccacagcttcaagacgaggtagccgcatatacacaaggtttgatctctactgaagacatgatgtacgcgcttcaaaccgcgtatgatgccgatgctgataacttccgtaatgcaatggcttcaaagctttccggtaatgaaactttcttctctacgatcaaaaacaataatcaaggattatttgatgagctggcaaacgcatatggtttggatgttaagaactggaagacaatggcacaagccaaagcagagattgatcaggctttaatacggaatttatcgtctgcatggtcggagtgtaattataggatctgacaaaacccagtaataccaatggtttgcagaccgtcaacaagagattttatccaacaaaacagaaaatgaaagggacaccgctcaatttttcttgggtagcgtcccttttttataaatgaaagcaagcaccgcccgaggggactatgggcggtacttctatataaaaccgaacaccgaaaggaggagttcatctccaccgttgccagccattttcaggctggcatttttcataccacgacaaggaggtatttagtgaatggcagaagataagaaacagccgcccgtcccggaggcgcataccacgcccgaggccccggctcctgaaacgctgggcggccccgccgtggaggaacaggccacgatccccggtatggagagcggccccgctccctctggtaaggtgatcgacctgtccgatgtgcgggctgctggtgcggacaaggccaaggccgccgagcctgataaagtggagccgcctgccccgaaagcagacaaacagcccgacaagcccgcgcccgccgctgatgccagggctggcaaggaaatgctcaaacaggcccgcccgcctaaagcggataaagccccgccaaccgataagggggccaagaaagcagagcaggctgacaagccccgccgtggccgtcctcccaaggatcaggccgccccggagaaaaagggcaaggtggccccggccaaggctcccgcagaagcggcaaaagccgatcccccggccccggaggttcctcccgctccccgcgacgctacccgcgccgtcaaggaggaaatcgtctatattaacctttccgagttgcatccgttcaaggaacacccctttggtgtccgggacgatgcggaaatgcagggtcttgtggagtccgtccgttccggcggcgtgaaccagcccgcgctggtgcgtccccttgaggatggcagctatgagattatcgcgggccaccgccgccagcgggccagcgaattggccgggtttatgaatatgccctgtatcgtccgcaacatgacggacgatgaagccatcctcgctatgacggatgataacctccgccaccgcgaaacgatcttacccagcgaaaaggcccttgccctgaaaaagcagtatgaggctatcaagcatcagggatcgcgtggggatgatgcggcggcgggtaagctctcgctggaaagcgtaggccagcgcaacggcatgagcgtgaaaaccgttcagcggtatatctggctcaatgaccttgttcccgagctgaagcagacaatggatgcgggaaaactgtcctttacccccgccgtggaaatctcccgcatccgtcccacccaccagaagtatattgccgtttccattgagggccagcagtcctcgccctccaagggacaggcaaacaggctccgggagctggataaggacaacaagctgaccccggatgtcattgacggcattttgagtgaagaaaagaaaaaggaggatcgtgacgtgattattaccggctctgaattggaaaagttcttcggcaaggaggccacgccccgccagatgaaggatcagatcatgaccctgctggccgactggaaagagaagcagccgcccgagcttgccaagcccgacaagaaaaagacggataaggagaagtaagcacctctggccatcgtgaccagaggttttttcgtccccaaacggggtgccccgtgaagtcgcagacttcatggggagaggaggcacaacggagcgtgtggattttgggcgcttgcgtccaaaggaacaaagcgaagtttgtgccgacgaaggctcctgtgggtatatcccccgtcgccgcccattaccgggcgcatccgggagctggccgtcaagggggcgtagccccgccaagggcggcttgccctttacggtctgccccagctgtgccatatccagcggcgcggcgggggtatatcctccagagccgcccccttttccaagactggaaaagggcgggggaaaaaggttgaaccgtcccctgtaaaactaactttgaaatggaggtattccttatgaaaaggccccttgcctatatcaccgccgcatggtgcggcgatccccatgaaatgaccgaacaggcggccaagtattgccgagccgtctatgacgcgggcttttccccaatctgtcccacgctctatctgcccctgttcctcaacgacggggttcccgaagaacacaaaagcggcatcgatatgggccgcgatctgctccgccgctctcatgtgctggtggtgtgcggtcataccgtcaccgagtccatgaagaatgatattgccgtggcccagcggctgggtatcacttcgaccacgctggagggcatcctgaccgtcaagcgtcagggccaccgctaatgtcagccctgattgaagcctacgttaccaaccttgggaaatacgccgagtatggcgtggaggctggagaaaccctaaagtttcccgccaccaccgaggaggtacaggcgcttttgaagcgaatcggcgtggacggtgtgcggtatgaggaaatcttcattaccgcgtttgacggcgatgtgctgggtatctgcgactgtttgagcgagtacgaaagcattgacgaactgaaccatttggcccatctgctctccgagttggacacctctgagcttgaaaagtttgaggccgtcatagacagcggcgagtacacagggagcgtcaaagacttaatcaacctgacgcaaaatctggattgctttgaattttaccccgatattgacgatgacgaggctctggggcgaatgtacgtccaggacttcggctccatccagatcccggagcatctcattgactatatcgactatgaggcatacgggcgggatatgcggatcaacgaggacggccactacgcccccggcggctatgtgtttaacaataacagccgttttattgagcactactccggcagggatgacattcccccggagcaccgcattttcgcctatccaaaactgaatatccgggagcagatggcagcctatcaggaaatcattgaccgctccgcgctgagcgaggacaagcagcggctccccgtcagccgcgaggacagatagcgccgcctctggtcacggtggccagaggcggcaaatggggttccccgcaaagtcgcagactttatggggagaggagccacaacggagtgtgcggattttggccgtttgcggccaaaggagcaaagcgcagtttgtggcgacgagaggaggtggtttagatcgtaggtgacgaagtttcccgtcagaccatcgccgtcagcgttcaggcatccaagctgacggcccggagccttgcctatgcgctggccgccgtgggccgccagattgccaaggagcaccgcaaggcccaagccccccacggcaagcagagcgtaaaaaagctcatgagccacggcggggccacaagcagtatcgaactgtccggggctacccggcactttgaccgggtggcccggaaatggggtgttgactatgcctttcgccgggtggacaagggcaaatatctgttactgttcaaggcaaatcaggccgacgccatcacgggctgttttgctgagtattcccgcaaggagctgaaccgggccaagtcccggcgcaccccgatccgcgaacagctcaaccgggccgaggaacaggtgcggaaacagccccagcgggagctggaaaaggaggcggtgcatggggacagataagctccgcaaatatgtacttcccaatatcccgtatctgttcatcggctgggcctgcctgaaagtggggacggcctaccgtctggccgctggtgcgggcttcggccaaaaactgctggggatcatgcagaccatcggtgtggcctttgcagattttgcaccgggcctgaacccggcagactggctggtgggtgtcgtgggggccgtgggctttcggctcctaatctactgcaagacgaaaaaggccaagaagttccgccacgatgcggagtacggcacagcccgctgggggacggaaaaggacatcaagccctttatcgatcccaagtttgaaaataatatcattctgaccgccacagagcggctgaccatgaacacccgcccggccaaccccgcaaacgcccgcaatctgaacacctgtatcatcgggtcaagcggatcgggaaaaacccgcttctggcttactccccagctactgtccgctcattcctcctacgtctgcgtagatcccaagggcggcgtcctctcccaagtgggctacttcctgcaaaagaagcgggggtacaaaatcaaggtattcaacagcatcgacttttccaagtccatgcactataacccgctggcgtacatcaaaaatgaggccgacattttgaagttcgtggacaccctgatcgccaacactaagggcgagggcaaggagggcgatcccttttggacgaaagcggaaacgctgttatactgcgccctcattgcctacatcatttttgaaggccccgctgaggatcggaatatgaacacgctggttgatatgatctccgggatggatgtcaaagaggacgatgaaaactacaaaaacgccgtggattatatgtttgacggtcttgccaagcgcaagcccgattgtttcgccgtcaagcagtaccgcaagtacaaattaagcagcggcaaaacggcaaagtcgatccttatttcctgcggcgcacgtctggccccctttgacatcccccagcttcgggaaattatgagctatgacgagctggagcttgaccgcatgggcgatagacggacggcaacctttttcgtgatctccgacaccacacagacctataacttcattgtggcgctggccttttcacagatgttcaatcttctttgtgaacgggccgacaacgtacacggcgggcgtttgccccatcatgtgcgggtgctttgggacgaggcggccaatacaggacaagtcccccaactggagaaattagtagccgtcatccgctcacgcgagatcagtctggcgcttctgtatcaggcgcagtcgcaatgcaaggccatttacaaggacaacgccgaaacaatcttcggcaacatggacaccatgattttccttggtggccgggaaagtaccaccattaaggagatttccgaaaactggttgggcaaggccaccatctctatgcagaccgagggccgctcccgtgggcagtcagaaagtttcagccagaacacccagcggctgggccgtgagctgatgacccccagcgaattggctaccatgcccggagatcggtgcattttacagcttcgggggctgccgccgttctactccaagaaatacgatttgaagcagcaccctaactacaaatacaccgccgaggccgacaagcgcaacgcctttgatctcaacagccttgtcacccggcgcatggacaagctcaatcccaatgaacactacaccgtttacgaggtggccgtaccagacgaggcgcacatggaagaggacgaggacatcctcaactatgacgacctcgacgacccggacacctttgtataacctctggtcatggtggccagaggatgacgcgccgcccatttgggcggctattattatgggttcccgcaaaatcaaagattttgtgggaagaggagccgcaacggaatgagtaatttttcgcgcttgcgcggaaatgaacgacatgaagtttgcggcgacgaggccggggcatggccccggagaaatggaggcatatatggcttttttcacttccgctgttactaccttgcagaccctcgttgtggcgctgggcgctggccttgccgtgtggggtgtggtcaatttgctggagggctacggttccgataacgcagcggccaagagccagggcatcaagcagctcatggctggcggcggcatcatcgtgctgggtacgaccctgatccccctgctgtctaccctgttttaagggcagcggcctatgggtattctcaccgaatggatcacggaatggctcaaagagctgttgatctcggggatcatggataacctcgaggggctgtttgacacggtgaatacccgggtcggggaaatatccgtacaggtgggaacgaccccggcggcatggaacgccggggttttctccctgatacggcagctttccgaaacggtcattttgccgattgccggactgatcctaacctttgtcgcaacctacgagctgatccagatgatactggaaaagaacaatatgcacgagttcgatgttgcgaatatctacaagtgggtattcaaaacgacttgtgccatcctcatcctctccaacacctttaatattgtcatggcggtttttgacgtttcccaaagcgtgatcgcaagctcggcgggcattatcggcggcagtaccgatgtcaccccggatatgctggacacgctggaggccagtctggaggcgatggagcttggccccctgctggggctgttcctgcaatcctttgtcattaagctgaccatgtttgccctgaatatatttattttcgtgatcgtgtatggccgtatggtggagatctatctgctgaccagtctggccccgattcccgtggctaccctcgccaaccgggagaccgggcagatgggccagaattacctccgctccctgttcgccgttggctttcaaggtatgctgatccttgtatgcgtggccatctatgcggtgctcgttcagggtattgccacaggcggcgatcccatcggggctatttggggctgtatcggctataccgtcctgctgtgctttatcctgatgaaaaccggaacaatcgcaaaaagcgtattcaacgcgcattgagaaaggacaggtgatccatgcaagacaacttcatttctggcaaggggaacccggcaaagtcggcagactttgttgggagaggagccgcaacggagcgggcggatttcggcggcaacgccgccgaagaagctgagcgcagtttgtggcgacgaggccagaacattaccccggagggcctgtacctgatggacgggattgaggggctgcgctccttgccccgtcattctgtggatatgcttttgaccgatccgccctacggcacgacgcggaattattgggatgttcccttgcccctgccggagctgtgggaggcggtgcgctgggcggtgaagcccgagggcgcagtgctcctatttgctcaatgcccctatgacaaggtgctgggcgcgtccaatcttcccatgctccgctatgagtgggtgtggtacaagagccgatgcaccgggtttctcaacgcccgccgcgctccgctgaaaaagacggagaacattctggtgttttatcagaagtccccggcctactatccacagtttgaacagggggagccgtacaagaaaatccaccaccgcagcggccacagtcccaactatggagcctttgaacgtatcagcggcgagtcggacgggcggcggttccccggcaatgtgctggcgttccccacggtggcgaatactgttcatcccacgcaaaagcccgtggaactgtgcgaatatctcattaaaacctacacccgcgagggacaggtagtagcggatatttgcgctgggagcggcacaacggccatcgccgccctgaacacgggccgccgctttatcggttttgagaacgcccctgccttttacggcccggcggctgaacgcatccagcgggcgcgggaggccgttgcccgcggcgagaaaggagtataatcatcggaagatattccatcatctacgccgatcccccttggcggtattcccaaaagggcttgcagggggcggcggagcaccactaccccacaatgggaattgatgatctgtgcgcgttacccgtggccgagcttgcggccccggacagcgcactctttttatgggctacgttcccccagctcccggaggccctgcggctgatccgcgagtggggcttcacctacaaaagcgtcgctttcgtctggctgaagaaaaaccgcaaagcggatagctggttttacgggctgggcttttggacgaggggcaacgccgagatctgtctgctggcaaccaaaggccaccccaagcgtcaggcggccaatgtccaccagttcattatttctcccatcgaggcccacagcaaaaagcccgacgaagcccgtgacaagatcgtggccctcatgggcgatctgccccgcgtggagctgttcgcaaggcagaccccgcccggatgggacgtatggggcaacgaggtggagtccacggttcccggcttctggtcacggtggccagaggatagcggaaaggaggacgagtcatgccgtatgtgaacgtccccaacgacttgtccaagatcaagacgaaaattgcctttaacctcaccaagcgccagttgatctgtttcggcggcgcggcggtggtgggcatccctgtgtatctgctgacccgcagcacactcggaaacaccgggtcgatgttcctgatgatcacgctcatgctcccggcctttttcatggcgatgtatgagcgggacggcctgccctttgaaaaggtggtgcggaatatcctccgggccaagttcacccgccccggcgtgaggccctatcagacgcagaacatttacgccccatttgcgggaaaggaggatgcttttgaccagaagcccaaagaaaagaaaaagcctgatccgggccggtaatcgcccggccaccatatccgcccagcagaccgtcccttatgtgcggatgctcccggacggcgtttgtcagctccccaacggcctgttcaccaaaaccgtggaatacgaggacatcaattattccgtggcttcggcggaggatcagacggctatcttcgggggctggagttcgttcctcaactactttgacagctccttgccgttccagctctcctttatcaatcgccgctcccgctccgggggccgctataaggtgaatatccagcccgccgaggacgagtacaacagcgtccgggccgagttcaccgggatgctgaaaaaccagattgccaagagcaacaacggtattgagcgatccaagtacatcactttcggtatccccgctgagaacgtggctgccgcacgcccccggctggagcgtgtggaggccgatgtcacgggcaactttaagcggctgggggtgcagtcccaacccctcgacgggcgggaacgtttggccctgctccacggccagctccaccccggcagccgggagccgttccgcttcaagtgggctgacatcgcccataccgggctggggacgaaagattttatcgtcccggacagcttcgacttccgacagtcccggctgttccgtgtgggccagacgtggggcgcggcgtcctatttacagatcatggcgtcggaaatgtcggacaagctcttgctggagattttggaattggacgcggagctgaccgtcaccatgcacattcagacggtggatcaggtcaaggccattaagacggtcaagggcaaaatctccgacatcgacaaaatgaaggtggaggaacagcgcaaggccacccgcgctgggtacgatcccgatattctcccgcccgacctcgttaccttttccaaggacgcggcagacctgctggccgagctccagtcccgcaatgagcgaatgttcctcctgacgttcctgatcgtcaacaccgcccccacacgggaacggctggaaaacgatatttttacggtgggcggcatcgcgcagaagtacaactgtgctttgaagcggcttgactggcagcaggagcagggctatatgtcctcgctggcgctgggctataacggcgttgaaatccagcggggcatgacaaccagctccacggccatctttattccctttatgacgcgggaacttcgtatggatgggccgtccctctattacggcatgaacgccctttcccataacgtcatcatggctgaccgcaaaaagctgaaatccgccaacggattgtatctcggctcgacgggtagtggtaaaagcttcgccgccaagcgggagctgctcaatgtttttctgaccattccccaggatcgaattttggtagtagatccgatgggggaatatgcgccgctggtgcggcggctgggcggtcaggtgatcgagattgccccggacagcccgaaccacatttccccgatggatctgcaaatgagcgtcaacgacgaggacagccccctttccatgaaagcggattttctgctgtccctgtgcgagctgatcgtgggcggcaaggagggcttgcagcccattgagaaaaccgtgattgaccgctgtgtgcgtcaggtataccgggagatcgcgctggggctggaaacggccaagccgcccctgctccaagacttgtacgaggagttgctgaaacagcccgaacccgaggccaagcggatcgccacggcattggagctttactgcacaggctccctcaatctgttcaatcaccccaccaacgtcaacctcaattcccgtgtggtgtgcttcgtgctgaaaggcatgggtgaaaacctccgcaagatcgccatgcacatcaccaacgattttgtcacttcagcggtcaatgccaactacaaaaacggcgtttcgacgtggtgctacttcgacgagttccatattcttctgcgcgatccgctgaccgccagctacttcgtggccgtctggaagatgcttcgcaaaaagggctgtgtgccgtcggccctgacgcagaacgtcaaagacctgctggccagccgggagatcgagaacattctggacaacacggatttcatggtgcttctgtcacaggcccaaagtgaccgggcgatcatcgcaaaacagctcggcatatcggagcaccagctttcctatatcacgcagtccaattctggtgagggcctgctgttctatgggagcgtgacgattccgtttgcagaccgtttccctcgaggagagatttacaatctgctgaccaccaagccggaggacgccgccaatggaaaacagacagagtagaccgggcggtgcttctggtcacggtggccagaagtttcatcaggacagcgaacaggccaagctccacaaatccaagctccacatggagagccgggaggaaaagctgggcaaggcccgtgatcggctggccgcgcagaagccgtctaagaaacccggccctgtgaagcaggcaggccgggtggccggggccgaggcccatgcctttgtgcatgggaaaatctatcaggaggagcatgacaacgtaggcgtggagggcggtcactttgttgagcgttccggggaggctgccatctactatggcaaacgcaaggtgaagcaggccgtccgggagcacccggccaaggctgccgcccgcgccgagtcccggtatatcaaggccacggcggattacaacgcccgtaagtttacccaggaacagcccgaggccgctaaaagtgccgccgccaggatgtggcataagcacaagctgaagcgggagtatcagaagcgggcgcgggaaaccgccaagcaaagcgccaaggctgccgagaaaacggcagtcaccacggaaaaactggccgcccaaacggtggccttcgccaagcggcatcccgtgggatcgctccttgcgctgggctgtgtgctcctgcttctgctgatgcagtcgtgtatgtcctcgatggtgacggtgggcaacggccttgtgggtgcggtagcggccagcacctatgcgtccgaggacgcggatatgctgggggccgaggccgcctattgcgctctggaggacgaacttcaagactacctcgacacctacgaggccacccacgattacgacgaataccactttgaactcgatgacattgaacacgacccctatgtgctgatctccatgatctccgcgctccatgaggaggcgtggacggtggacgaggtacgctttacgctccaagacctctttgagcgccagtatattctcaccgaggacgtggtaaaggagcggcggtactatattgaaacggacacatgggtggacgaggacggcgtgacccacacggacagctaccgggtgtactacgattatttcatctgcaccgtccaacttacaaacttcaacctttcccatgtgccgatctacatgatgaccgaggaacagctctctatgtatgccctgtatatgtccacgctgggcaaccggcccgacctgttcccgtcctcgccctatgtgggcaagtatgtcacaaacggccccacggagcatgaagtcccggaagcatatctgtccgacgaaacctttgccgccattttggaggaggctgagaagtatatcgggttcccctatgtgtggggcggctatcagcccagcacgtcctttgactgctccgggttcgtcagctacgtctacaaccaatgcggctgggacttcgggcggctgggggcgcagggcctttacaacatctgctcccggacaaacagcccccggcccggcgatctggtgttctttatcgggacgtatgatacccccggagtttctcatgtgggcatctatgtaggggacggctggatgctccattgcggagatcccatccagtacgccaacctgaacacaagctactggcagtcgcatttgtacgcctacgggcgattaccgtaaaggaggatttgatacatggcaattacgaaaagcgcaaaaattcaggccgagattgaaaaggtcaaggccaagatcgcggaacagcagacccggctgaaagaactggagcagaaaaagctggaagccgaaaacagcgagatcgtagacatcgtgcgcggtatgagcgtttctctggaggagctgccgctggtgctccagcaactccggggcgcttctggtcacggtggccagaagcccgcagccgtggaggaggtatcggaatgagaaaatttcggatgctggcggccacgctctgcgccgctgttctgatgtgtggtttctccgtgacggcctatgccgggggcggtgacgagtacatggaggacacaggcggcgtagagctttgggagaggcttgaccctgccgaggagatgcctgtggaaacgcccgatcccgagccgaaaccctttaccccctccgggacggggacggtggtagacaatgccacggacgaggacggcaaggagtttttcaccattatgacccccgctgagaatgtcttttatctggtcattgaccgccagcgggaaacggaaaatgtgtttttcctgaacgctgtcaccgaggccgacctgctggccctcgcggaaatgcccgccgagcctgtcccacccgcgcctgctcctgaacctgcggacgatcccgaacctaccggggagccggagcctgaacagcccaaggccacgggcggagccgggatgcttctgcttacgctggccgtggtgggtatcggcggcggggccgggtggtacttcaaaatctatcgtcccaaaaagcaaagggccgctgagtccgaggaggactacggcggcgaatacgatgactttgacggcgcggcctatgacgaaaccgatcccgaggacgataccccaccttgggacgaggacggcgaggaatgagccgggagctgacccgcgaggaaaaggccgtgatccgcaagctggtgacaaagtggtgcgccaactatgacaaggaatacggctgcctgcttggtttagggtccccgcgcaaacaatgtttgcgtgggaagaggaggaacagcgaaatgagcgaactttcgccaacggcggaagtgagggatatggagcttgtgacgacgagtgagtgctatatgctgggcaagtgctggacgggggccttttgccgctacttccgggaggccgttctgccccttgatcctatgctggaggccactctgacgcaggatggcccggccccggaaacccggatttgccccgtctgcggcagggtctttctcccggatggccgcacacgctattgctccccggtctgttccaaggccgtgaggctgaaaaaacagcggggatatatgcggaaataccggggctgatgtgtgagcatttggccctcgaaaaagcccgagattacagggctttccggggtcgcttttggggtgggccgtatgttttcatggcccgccccattttggcccgatactgctaacattttgaaaggagacaaccgtggagaaaaacgctggctataccatacggcgatccgttctctttgagggcgggagcggttttgcgctgggcgaaaacccaaaggcaccggccccgtttgtgacatggcaattcaatgacacggacaggggccgttcctacttttggggccattaccacgcggacaaggccgcagccgagctggatttcaattcccgtgtggctgaccacaagcggctgtacggacagcgggaggtcacgccccggcccattgcccagcagatgcaggaggccgcaaagctggccgaagctgaccggggccagacggctccgaaaaggaatgtccccgacaagggggacagataggaggtatcatggaacacaccaaaaacgccgagctgtctgtggagcaaaactacaaccacattgacggtctgatcaacaatctgcccattcaacccccggaacaggaaaagccgctggacaaggtaaaggagccgccccgccccatgcggagccgggagcgtgaggatcgttgaccaagaagcgcgtccgcaatgtgccgatcaatatatgggtgcgccccgacgagctggaaaccattcaggagcgcatggccgaggcgggcatccgcaacatgagcgcctatatccgaaaaatggcgctggacggctatgtgctccacgttgacctcgccccggtcaaggagttggtttccctccagcggcgctgtgcaaacaatctcaatcaggcggcgatccacgccaacagctacggcggcttttacccggacgagctgaaacagcttcaaaaggactatgccgacctgtgggggccgctgtccgatctgctggcccagctctccgccattctgacgctctgacacaaggggaacggccccacgccgttccccggctgtccctgcttctggtcacggtggccagaggcagggagaaccgggacatccttgagtatcgattttttcagagttataatagacatatacaggaaataggaggtaaaaccaatgcggatcattctgaaaatcatcgccgctcctttcgtgctgatgctgaccttgattgtggctgtgctctcgttcctgctgagtctttccgctggcgttctctcaatcctcgcttctctgctgggcatcctgagcgtgctgattattgtttgggagggcgatatgcaaacgggcgtcgccgggctgatcatggcctttgccatttcgcccttcggtctgccggctcttgccgagtggctgctgggcaagctggacgagctcaactacgccttgcggggcttcatcacaggctgatacttctggtcacggtgtccagaagatgcagaaacggcggctgaccacagccgccgtttgtcatattagagaggagggctgcccacggccacaacctatatcaaacctcataagcaggccgccaagcggacggccttgcaaagtctgaaagaccgcttcgactacggcctgaacccggagaaactgggagcggtgtcctcctgcctctgcgatcccgccacggcccacgccgagtttatggtggtgaaaaatcagtatgagggagaaacagaccgcaaggccgagcgcggtgcgctttgctaccagatccgtcaggcgtttccgcagggcgaggtgacggcggaggaggccaaccgtatcggctacgaaacggcgatgcgctggacaaagggaaaatatcagttcttcgtctgcactcacatagacaaggatcatattcacaaccacatttactacaattccacagcctatgaccgttcccggaagttccgcaatttcatcggctccacctttgccctgcggcggctctctgaccgggtgtgtctggagcacgatctgtccgtcattgcaaaccccaagctccacagcaagggccgctttctgcattacgggcaatggctgggcggagatcaaaagctctcctataaggagcagatacgccttgccattgacgcggccctgacagagcaccctgccgatcttcccgacttcctgcggcgcatggaacaggcgggtattcaggtgaagcgcgggcggggcggcgtgatttcattccgagtgtcaggacaggagcgggccacccgtttccgggcatccacgctgggggacggctacggcccggaggacgttcaggctgtcattgacggcaaggctcccacccgcaaggccgagcccaggcgtggttcccgtcccgcgccccagcgggtcaatctgctgatcgacattcaggagcgcatgagccacggcaaaggcccggcctatgagcggtgggccaaggtctacaacttgaaacagatggccgccgccctgcaatttctgaaagaaaacgatctgatggaatacgacgagctggcggccaagaccgaggcggccacggatcgctttcatgcgctggccggagagatccagcagaccgaggccgcgctgtccaaggtgtccgaccttatggctgctgtggtgaactacgccaagacccggcccgtgttcgatggctacaagacggcccggtacagcaagaaatttcttgccgcccacgaaacggagcttgccggctaccgggcggccaagaccgcgctgggcgagcttttgggcggggccaagctccccaaaatggacaccctcaaaaagtcccgccgtgagctgacggaaaagaaaaaggccctttacgccgactaccgcaaggcccaacaggagatgcgggagctggtagcggtcaagggcagcgtggatcatctgcgcggcctgacggacggccagcgcaataaggaacagacccgatagggctgtgacgcagacaggagtgcttctggtcacggtggccagaagtacggcgggtttggggagcaaccccaacaagtatttttgccgccccggtgggggcgcaaaaaagcaagtgtccatacacttgcattgcttgccgctaacgcgcatccccggaaaccccacgaaagaacggaggccgcgcccttccttacgcttcctccgtttctttcgcttctttgattgagcggataatggtttccaccagccgcaagtctttttcgtccatagaactgagcatgatgttgatacgctttttgcaagcgtcacctgcgctcatatcgggataaaagaactgatccaccgatatatcgaaccttgtcaccagctgataaaagatattcaggctgggatgctggccgtcgttttcgtggtacatgacggtgcggggatcgcggtcaatgatacaggccagttgctcctgtgtcatgccgctggcttctcttttacgcttaatctcgcgccctatatcgtggaaatcaaactttcgctcgtcgcgttcaaattgcatagacatcacccaatgtaattttacatttcgggtattagtatttgaacgatttataatttcacacaatatcatatttaatttcacgaaactgctgacttgaacacaccagtactttcgagactaatcttcgttggcctaacaatataaaagggaaatttttgaattatactccaaaatacttgaccgattcggttattgatgctatactctaaataaccgaaacggttattgtgtaaaaaaggaggaaatgaattggataaatttttggccctgaccgaagaaaagagaacgaccattctcaatgcggcgctccagtgcttcggcaagtttggttatgaaaaagcctcaatcaatgatattgcggtagccgcacacatttccaaagcgtctgtgtttcagtattttggcagtaaaaagcagctctacatttacctgctggaatactgcaagaaaatcatagagggaatatttgataaggaagcactcgattcccaaacggacttgttcgacaggatcatgacttccagcaaaatagaaatggagagtttcaaaacacagcccttcattctccaatttatttccagcgtctgggaggaaacttctcccgatgtactggattcgctggtcatcctgacggaagaaacctgcaagttcagaaacgatatgattttacgggaagatgacgctttgaaattcaagaacccggaagatgctggccctgtattccaaatgcttctgctgatggccgagggctatgcggcccgataccgtggagcggacacttttgattttgataccgtcatggatgattttcaaaagaacatcgcgattttgcggaaaaatttttataaggaggagtatttgaaatgagtgaacaagcgattgtcttgaatgaactgaccaagcactatgggaagcatcgaggaatcaataacctcagcttctctgtcaaccagggagagtttttcggctttatcggccccaacggtgcgggtaagtccaccacaatccgcaccctgatgggcctgatccgtcccaccggaggcagcgcatctatctttggtttggactgtcactccaaggccagcgtcattgccaaggatgtgggctatctgcccagcgagaacagctattacgaaaacatgaaagtccgcgaacttttgcagtacaccgccgatctgtacggcatggactgcaaggcaaagatgaaggagcttgccgacagactcaatctggatctgtcccgcaagattgcagacctttctctgggcaacaagaaaaaggtgggtatcgtgtctgccattatgacttcgcccaaactgatcattatggacgaacccaccagcggattagacccactgatccagcaggctttctacgatattctgaaggaggaaaacagccggggcgctaccgtgtttttttcctcccatgtgctgagtgaggtgcagaaactgtgtgaccgggtggccattctgaaagaaggacagcttattggcatacagtccatcaaagaactgcgtgagagcggctataagaaagtctctctgagcgcaaaggaggctatccctcgcgatttctttcatttgtccggcattgcgaactatgcggagactgcggataagacctctgtctcctttatgtataacggaaatatcacggccatcattgataaaatccacctgctttctctggacgatgtgcttttggaagagccctctctggaagagatcttcatgcactactatgaataaaggaggtgtcgggcatggtcatttttaagtatgaactgaaaaggcaccgcaaatatattttgggttgggccatcgccttggctctgtgtgtttttttgatgacgcctacctattacagctttatggatgtttccaccggagacctctatgaaacgctgggtacgagtgatttttacaagggcgttggcgtgtccatggaatatctgacctcgccgttgggcatttatgcgtttcttaccagcttttttatgattgcgtccggtattttcgggatgcacttcggtatcgccattcacaccaaggagtgctcggagcgaacctccgaatatctgtttacaaagccccatacccgaaaaacgatttactgggcaaaggcgttcacggtttttttcggcgtagtggtcgtgagcatggtatatcttctcgcctcttttttggcgctggccctgttccgctccggcattgactggggagagttctttctgatcgctctttcccttatgctggtcacgctgttccttgcagctatggggcttttggtaggaattctattttcacgcaatcgaagcccacttttgactgccgggttaattgtctttgtcgagtactgcgtcaccagcttctccaacattgtcagcaaccgtgccattagttttctatccccgtactcgttctttagtgcggctgagatttccaaatctggcttttatgagttggattacttgggatggtgtgtgctgctatttgccctgtttttggtgctgtcttatcgtgtctttttgaaaaaagacatccagttccgctcatgagggggtgcaaagatgaaaacattggtgaaaaacgagttccgccaaaccagaaagaccctgctaatctggctggggatcatgttactgctgtgcggattctgctattttgaacttttatccttgaaggacagtctggatgagatggcccggacagtcggccaattccctcgcttgatcatgatcatgttcggtgtgaaaggggatctcacgactgcccttggttggtacgcgtgtatctatttttgggaggggctgttggcctttgcctatgcaatctctctgggcctgtcctgtgtggcgagggaaaagaaatttggaacatccgaatatctgttcacaaagcctgtggagcgaaaaaccatagttttggcaaaggtgattgtttcatcggtgaacctgctggtattttccctgttcagcggtgtgtgcaattactttgcggtcattctcccgatggggggactggaacaaccgggagctggaactgcaactgcggttggaatgttcttgacacaacttctgttctttgccttgggcctactgtttgccagcctcttcaaatcttataaggctgcggttcgtgttggtacggttttcgtattggccgcctatgctgtcgccatcaccgccgagtacgctgggaaccgtttcttagactatctgacccctctgcggtactatgatgtgtatgaagtagcactaaatggcgtcgatctttcctccatcgtcttaacagtactcattgtgggcgcgtgtgtaatggtttctacaaggcggtggaaactgcgtgagttgtaaatgtaattgtccatagatattctactatctgatgaaaaacaaagaatgaaaaataccgaatggctattatgccccaactgcaacaacaaaacgagaattaaaatctgtgataatacagtacttgaaaattttccgctatactgtccgaagtgcaaacaggaaataataatcagcgtaaaacaattcaataccacagttatcacagagccagacgcatagacgcagagccgataacccgttatctttttggtgcggtttatcggctctttgcttttgctcctgaaaacaagcgcaccaagacacaaaaccgttgcactacaacgatcttgcgcttgagatgtcgcggcggttgaaatagttcatttcagccgccgttttccgttttgaaaaactggaatacgggggggcgtgttaaagtcgcccttttttgaggacacggcggtatccgggaggtatcgccgtgtccgtttcgctattccatagcccgcatgatcttcaaccgctaaaaaaagcgtagctccccctccgggatcgtctggctacaaacatgaaattagccagtacattaaatgcaataatttttcgtgcgtccgcatagcgccatgctgtgcgggcgtttttgtatgcccccgcccttgcttctggtcacggtggccagaggcttcccggtgtcgtgggccgcctgttctccatttcgatccgcacctaccaaagaatttgaaatggaggacaattttatgactacgatcaacctgaaacggtattatccttatatgaccgaaaacatgacgatggaagtgtctgacgagatcgccgccgtcctctctatgggtggccgtctgtgtgacagctacaagcgccagaagcgcagaaacggtgagtgctccttggacaccgatcccggcttcgaggccgacgtgctccacggccccatgaccccggatgagtacatggagaagcaggagcgcgatcttgccctctatgacgcgctggcccagctcccgcccgttcaggcccggcggatctatcagcactatatcctcggcaagagcaaggccgagattgccgctgccgagggcgtgggcaaaagccgggtctgctgttcgattgaacggggcttggccagcctgaaaaatattctgaaaaattctctctaacagggagtacttttacctcctaagtgccctgatagatgagaggtacatttcttctcgctgacaactgaataaacagtactccagatacgaaatccgcgtgatagcgacgtaaggtgcgccgccacgacagccagctttaggaggtgatggacaagctggccgagcgatctacgcagcctttaacccggtgctggcaatccgggcgcaaggacagcgcgggggataatgaaacttgttcacgccctcccacggacttgagggggagtccctgccgtatgcgccagccctccacgggcagcggtatcgcggggctatgcagccggggccaccggcggtctggaatactcccagcgccggggatgcgtggcaaatacggcgtacaaatcaatcagagagccgccgatccggggcctttctgtcttgtgacagcccaaacttgacccggcccgtcggctctctccattgtggattgaaatggaataaaacagtctccctgcttctggtcatcgtggccagaggtggggcaaggtcaaagggcggcgcttttagcgccgcctttccgcgtttccccacaggacaacgggagactggtagtatcaaacaacaacggaacaggaggatgctatgacagatcccattgatcgggaggaatatgtatatcaagtcgataagataaaattcatcgtcacgcccgtctacaaggaggacggagagccgatgcgcgatattctcttgaaactgatgctggcggaactggagccagcttaaccccctttcacggacatccttaacatgggcggtcaacggaggtataatataggtaggataaaacctcttgtttgacggctgaaaggaggatattttgaaacagtcaaacaagaatttcgcagtaggtactgccgctctatattgccgcctgagccgcgatgacaacatggatagtgagtccaacagcattagcaaccagaagaaaatacttcaaaaggccgccaaggaaaagggctacaccgatactattttctttgtagatgacggtatcacgggcacgacgatgaagcgtcccggctttcagaaaatgctgacggctattgaggctgggtatatctcggctgtgtttgtgaaagacgcccctgtaataataggactaataaactaaaggctcaaaaaagtgctggaaatccagcgtttttgagccttttcacataaatacaatcgaatcgtacatagcgcgtttgttacccaaagtgacgcattgggttggcagacgcgctatttttttgcccagacgcgggcggaaggaggtgtaaacgtgagagcgtatggcaagtcgtgggactacaacgtatatgactgccggtactgtctgtactggaaaggcaggaaaagaggctgcgtctaccctgacggctgctgctgtccggtagatcaaagggatgcagttcagttccgcgacgatgaagataaagagaataccgcacccgtttcggagtgcaggaattgtccctacgggcgtgattctccctgtatcgggtggtgtaccaaggaggtcatgcgcgccgtgggactgctgaaggagcgtgacggccccgatgtatgactacttctacggcgcggagtcggaacagttctctttctatcgcatcccgaaggtgctgttcacggaggaacggtttaagaatatctccgcagaagccaaagtgctctacggtcttctgcttgaccgcatgagcctttcggcaaagaacggctggcaggataaagaaaaccgggtgtatatcatcttcaccatcgaggacatcatggaggctatgggctgcgccaatcagaaagccggaaagctcctgcatgagctggaaagcaaatgcagactcatcgagcgaaaacggcagggtctcggaaagcccaatctcatctatgtgaagaacttcgttacccccgcggaatcacgtttcttgaatcgtgaaaatcacgattcaggagaagtgaaaatcacggatcaagaaccgttaaaatcacgatctaataatactgagtataataatactgattttagtgatactgattcttttcccttcacttcgttcagagaggatcacggacgggaaacgaaaagaagcgatgcgaatcagagagagcgatacagagaaatcctttcggggaatatctcgtatgagattctcttgcaggactatccgcttgaccgggatattctcacggaaatactggagctcatggtggatacggtctgtacaaccaggagcaccgtccgtatctccggggatgacaagcccgcggaggtcgtaaagagtcaattcctgaagctggacagcgagcatatccgctttgtcatggacagtctgaaggacaacaccacccgcatccgcaacatgcgtcagtatctcttagcaaccctgtataacgcccctctgaccatcgggaactactaccgaagtctcgtcagccacgatatgtcggagggcttcatctgagccgtaggcaatgcctgcggcttttgtcatttcaaggaggaggtgaaaacagtgccaaaacaggaaccccgggaacaggtacagcagataccgctgtcggatattcacccgttcagaaaccacccattcaaggtgctggacgatgagctgatgcagcagacgatagacagcatcatgcaggtggggattctcaatcccgccattatccgccccgacccggagggcggatatgagatggtagccggacacaggcggcttcacgccgcagaccttgcagggctgaaaaccatcccggcaatcgtccgcaatcttaccgacgacgaggcggtgatccttatggtggacagcaacctgcaacgcgaaacgatcagccccatggaacgggcgcaggcttacaaaatgaagctggaagcgctgaaacatcaggggaaacgtgtggatttggaggacaagtccacttctacgcgaattgcacagaagttatctgtcgaaaaagtcgcggaagaagcaggtacaagcagagaccaggtacgacgctatatccgcctcacggagcttttgccggaagtgcaggaaaaggtagagagcaaggagatcgcgttcagccccgccgtggagctgtcatatctcacccatgacgagcagaggcagtttctggacgcgatggactattcgcagaataccccctctctttcccaggcgcagcggttaaagaagctcagccgtgaaggtaaatgcacgcaagaagccatattcgccatcatgtccgaggacaaaaaggacgacctgacgcggatcacgctggataacgatgtgcttcgcaaatacttcccccgaaactacacgcccctgcaaatgcagcagaccatcatcaagctgctggaacagtggcagaaaaaacggcagcgccagaacgagcgctgagaaaggcaggtatcccatgaacgtaaatatcacaatcaacggcaacatccatatccactgcggctgctgcgaggactgcgactgtttctatgaaagcggcttcgacgaagcgtatgaaatgccggacgaggatgaaggtgaaatcaccgagtttcccccggaggaagccgaagccgtgctgaaggcggtcgcggagctcatcattccgcttttgcaggaatgaggtgcggcgcatgaaggagtttgatgtaacgatcacagaaacgctgaagctcaccgtatctgtggaagcctcctccaaagaggaagccgagcagatggtaaacgaccagtggcgcgccggagatcatgtgctggatgcggacaatttcgtggatgtggagtttgagagcaacgacggcaaggaaatctccgctgaacgagagccggacaacaccatcgaagtgcttatggtagagccgggacagtatccgcgcatggagcggatcggcgctgatcttcgctccttacagaaagccgtggacggagatattcaggcggtttacccgtatgacgacgccgtggctttgatctgtaatgacgaaggcaaggtaatgggtctgcctttgaaccgcgctctgcgggacgaaaaaggcgaaatctacgatattgtcgccggaaagttcttcatctgcggtctgggagaggaagactttgcttcgctcccaaaggagctgcaaaagaaatatgaggacaagttccgtcagccggaagcctttttgaagatgggcagcaaaatcaaggcaatccccaccgagcccgcaaaagcctccgccaaaggcaaatcggcaccggcagcggagcgatgacgatgcttctgttatttcgcatgaagggagggatgtctcatgcaggaggaagttgaacacagagccgttacccttatgatctccgccgcaaagctgaccggcagagaactgaaagcggcaatcagcaaatatcttgccagccgcaaggcgcataaacaaaacaaggcggaggtcaagcccagcggcaggcagacggtaaaacagctcgtcggacagaaccagggcgtgtccaacatcgaagtcacggaaagcaatatcaagggctttgatcgcgtggcgcgaaagtacggtgtggactacgccatcaaaaaggacaagtccggcgagattcccaagtacctcgtctttttcaaggcgcgggacgcggatgcgcttaccgcggcatttaccgaatacagcggcaaaaaggcaaagaacaaggataagccgtccgttatcaagatgctcagagcgctccgcgcaccggagatcgcaaaggatattgcgaaggtacgcaacaaggacaaggggctggagatatgaagaagccgctgaatataaagaagatcgtgctacccaatctcccgtatgcgttcatcgccctcatagcgacaaagctcggacaggcatggcggctggcagagggtgcggacgcatccgcaaaggttctcggtttcctcacgcaaggtctcggagaagctttttcctcgccgctgccaagctttcacccggctgacctgcttgttggcatcgtgattgcgggcatcatccggctggtcgtgtatgttaaagggaaaaacgcaaagaaatttcggaaaaatatggaatacggttccgcgcgttggggtacggcagaggatattgccccctacgccgatccgaagttcgagaacaacgtcattctcacgcagacggagcgcctgatgatgtccaaccgtccgaaagaccccaagacggcacggaataaaaacgtgatgattatcggcggttcgggaagcggaaagacgcggttttggctaaagcccaacctgatgcaatgccattcctcatatgtggtcactgatccaaaaggcagcatagcggtcgagtgcggacgcctgatgctccgcaacgggtataaggtcaaaatcttcaattccatcaacttcaagaagtccatgcactataacccctttgcgtatatccactcggaaaaggatattctgaagctggtgacgacgctcattgccaacaccaagggcgacggtaaatccggggacgatttctggcagaaggcggaaacgctgctctatacggcgctcatcggatatatccactatgaagcgccggaggaggaacagaacttcgcaacgctcattgagtttatcaatgccatggaggtgcgcgaagatgatgagaccttcgagaacaacgtggatttagcctttaaggagctggaatccagagagccgaaccacttcgccgtgcgccagtacaaaaaatataagctcgcggcgggcaagacagcgaagagcatcaacatttcctgcggcgctcgcctcgcccctttcgatatccaggagctccgtgagatcaccatgtacgacgagctggagctggacaccctcggagacagaaaaacggcgctgtttctcatcatgagcgatacggacagcactttcaatttcctgatctccatgatctacagccagctctttaatcttctgtgcgagaaagccgacgatgtgtacggcggcaggctgcccgtccatgtgcggtgcctcatcgacgagtgcgccaacatcgggcagataccgaatctggaaaagctcatggcgaccatacgaagccgcgagatctccgcctgccttgtgttgcaggcgcaatctcagctaaaggctttgtataaggacaatgccgataccatcatcggcaactgcgacagctccatcttcctcggaggaaaggagcctacgacactcaaggagctgtcgcagtcgctcggcaaggagacaatcgacacctacaataccggcgagagccgcgggcgtgagacctctcacagcctgaactaccagaagctcggcaaggagcttgccaccatagacgagctggcggttctcgacggcggcaagtgcatcttgcagctccggggtgtgcgtcctttcctttcggataagtacgacatcaccaaacaccccaactacaagtatctttcggacgcgaaccccaagaacgcctttgatatagagaagtttctctctacaaagctggttccgaaagcagacgaagcctacgaggtattcgacgcaggccgagtctgagcgcacaagcccgtcgccgtaacagcggcggcttttcatatatacctacgattaaaagacacctcctcgcttgcagggtcggaacggatcaatcaaattaaaaaaatgaaaggagacgccggaatcgggagctgcatcgcagttttcgttccggcttttgcagtgaaagcgagatttccgaccaatcatcccaaagattccggcaaacaatcattatggcatttttcaacagtgcagtcggcgtactccagaccctcgtcatcgccctcggtgccggtcttggcatctggggagccatcaacctgctggagggctacggcaacgacaaccccggcgcgaagagccagggcatgaaacagctcatggcgggaggcggtgtggcgctcatcggcatcaccctcgttcccctgctcaccggactgttcggctaattccacgcataaatcctgcgcggcatccgcccttcggggcgggtgccgcgggaaaggagggtaaagcccattggatttgatatggggaaaatttacggaatggctgaaggaaatgctcgtcagcggcatcatggataatgtcaatggcatgttcaactatgtgaacggcagagtggcggagatcgccggacaggtgggcgctactcctcaaggctggaacagcggcatctacaacatgatccgaacgctctcggacaacgtgatcctgccgattgccggcgttatcctcgcctttgtcatgacgctggagctcattcagctcataacggaaaagaacaatctgcacgacgtggacacatggatgttcttcaaatggatattcaagaccgcctgcgccgtgctcatcgtaacaaacacatggaacatcgtgatgggcgtatttgaagtcgcccagagcgtggtaaacagcgcgtcaggcatcatcatatccgacacgtcgctggcgctttcggacaacatcgcaagcttcgaggcaaggctcatggaaatggagccctggccgcttctgggactgtggctgcaatctttcatcgtgagcctcggcatgtgggtcatgggtatctgcatcttcctcatctgctacggcagaatgatcgaaatatactgcgtgacctccatagcgcctatccccatggcgaccatggtaaaccgcgaatggggacagacgggtcagaactacctgcgcagcctcttcgccctcggctttcagggatttttgattatcgtctgcgtagcgatctatgcggtgctggttcagaacattgtggcggagccggatatgactgcggcgatctggacttgcatgggatatacggtgctgctgtgcttcacgctgttcaaaacgggcagtctcgcaaagagcctgttcaatgcccactgacggaggtgatgaagtttggcatacgttcccgtacccaaggacttgaacgcggtgaaaaccaaggtcatgttcaacctgacaaaaagacaactgctgtgtttcggaggcggcgcgcttgtgggcgtaccgcttttctttttgctcaagggcagcgccggttccagcgcggcggcaatctgcatgattatcgtcatgctcccgttcttcctgctggccatgtatgagaaaaacggtcagccccttgagaagatcgtcgggaatatcctgaaggtctgttttcttaggccgaagcagcgaccgtatatgacgaacaacttttatgacctgctgaaacggcaggaaaatctggataaggaggtatacgccattgtccacaaacaaagcgcccgcaagaaagctcacaagagccgagcgaaaggagatcgcagcggcgattgcacgagcaaaaaatcaggataagaagaaaaagtccgcacaggacagcatccccttccagcgcatgtacccggacggggtctgccgtgtgacggacagctactacaccaagaccgttcagttccaggacatcaactaccagctcaatcagaacgaggacaagaccgcgatctttgacggctggtgcgatttcctcaactacttcgacagctccatcagcttccagctttcgttcatcaacatgtccgccacaagggatacctatgccgagcgcatcgccattcccttgcagggcgacagcttcgataagctccgctccgagtacacggatatgcttcaggcacagcttgccaagggaaacaacggtcttatcaagacgaagtacctgaccttcggcatcgaggcggacaacttcaaagcggcgaagccgaggctggagcgcatcgagacggatattctcaataacttcaaaaagttaggcgtatcggcgcagcctatgaacggcatggaacgcttaaagctcatgcacgatatgctccacatggacgagccgcagcccttccgcttttcctgggactggcttgctccctccgggctctcggtcaaggacttcattgcgccgagctcctttgaattcaagaccggcaacagcttcggagtcggcagcaagctcggctgcgtgtcctttttgcaaatcctcgcgccggagctcaatgaccgtatgctggcggactttctggatatggaaagctcgctcattgtgagtatgcacatccagtccgtggatcaggtgaaagctatcaagaccatcaagcgcaagatcaccgaccttgaccgcatgaagatggacgagcagaaaaaggccgtccgcgcaggctacgatatggatattatcccgtctgaccttgccaccttcggaaccgaggcgaaaaagctcttgcaggagctgcaaagccgcaacgagcgcatgttccttctgacctttctggtggtgaacgtggcggacaacaagcagcggctgggaaacaacgtctttcaggcaagctccatcgcgcagaagtacaactgtcagctcaccaagctggactttcagcaggaggagggcctcatgtccgcgctcccgctgggatataaccagatcgagattaggcgcgggcttaccacgtccagcgtcgccattttcgtgccgttcacgactcaggagcttttccaggatggcaaggaagccctgtactgcggactcaacgcgctttccaacaacctcatcatggtagaccgcaagctcctgaaaaaccccaacggtctgatcctgggaacgcccggctccggcaagtccttctccgcaaaacgcgagatcgcaaacgtgttccttgtcaccacggacgatattatcatctgcgacccagaagcggagtacgggccgctggtggagcacctgcacggtcaggtgatcaaaatctcgcccacctcgaccgactatctgaaccccatggacttgaacctcaattacagcgacgatgaaaacccgctttctctgaaatcggacttcatcctgtccctgtgcgagctgatcgtgggcggcaaggagggcttgcagccagtggaaaagaccatcatcgaccgctgtgtgcgcaccgtttaccgggaatacctgaacgatcccgttccggagaagatgccgattttagaggacttgtacaacgagcttcgcaggcaggacgaaaaggaagcgcagtatatcgcaacggcgctggaaatctacgtcaccggctccctcaacgtgttcaatcaccgcagcaacgtgaatatcgaaaatcgcgtggtcagcttcgatatcaaggagctgggaaagcagctcaaaaagatcgggatgctggtggtgcaggacgcggtatggaaccgcgtcaccgtcaaccgcgaacagcgcaagtccacccggtactatatcgacgagatgcacttgcttctcaaggaggaacagaccgccgcatataccgtggagatctggaagagattcagaaaatggggcggtatcccgacagggatcacccagaacgtcaaagacctgctttcctcccgcgaggtggagaacatctttgagaactccgactatgtgtatatgctcaaccaggcgtccggcgacaggcagattctcgcaaagcagctcaacatctcgccccatcagctctcctatgtgacgcaatccggcgagggcgaaggactgctgttttatggcagcgtgatcctgccctttgttgaccgcttcccgaaggatatggagctgtacaaggtcattaccacgaagctgtctgaacagacttccgggaattgaggtgacagcctatggcaaaacgaaccccacggctgcaattcaccgaagaagaacgcgccgtgcctgcgcttgaaaaggtcatccgcaaggcggacaaggcggcggataagctggagaaggcggaagccaaaattccgaaaaagaccgtaaaggtgaaagcgcgcgttgtggacgccgataccggcaaggtcacgacgcgccttttctttgaggaggtggataagaagcgcccgccctccaagctgtcccatctggcggaaaaagcgccgctggataccgtccggggcgcggttcaccggaagctcagagaggataatgacggaaacgccggtacagaggcggcgaacacgctgtcccaaaccgcagagagtagttaccgcattgcggaaacggcgcatcgctctcatgcggagaagccctaccgcagagcggaaaaagcggaggcggcagcggataaagcaaacctccgagccctgaacaggaagtacgaacaggaatacgggaaggctaccaacccgtattccaaatggcagcagaaacgggcgatcaagaaggaatacgccgccgcgaaagccggaaacggcacgaggaataccgcaaaagcgtccgaggcgacggcgaaagccgcaagacgcgccgccgaggatacgaaaaaggcaggctcctttatcgtgcggcataagaagggctttctcatcgtaggaggcattgccgccgtgatcctgctccttatgaccggcatatcctcctgctccacgctctttcagggcgcgacctccggcatcgtatcctccacctatcccttagaggattcggatatgctggctgcggaagctgcctactgcggcatggaggcggagctgcaaagctatcttgatacctacgaaagcacccacgactatgacgagtaccatttcgacctggacgagatcgagcatgatccctatgtgctgatctccatgataaccgccctcaagggcggcgaatggaagatagacgaggtgggcggcattctggatatgctctttgaaagacagtatatcctcaccgagcgcgtcacgacggagacaagataccgcaccgagacacggacgggcacacggtacgtcacgaacccggagaccggcgagagctatccggaggaatacgaatacgatgtggaggttccctacacctactatatctgccatgtggagctggaaaacttcaacctctcccatgtgccgatacacatcatgtcacaggatcagctctccatgtacgccgtgtatatgagcaccctcggcaaccgtccagacctgtttggggattccgcgtatgtgaaccgctattaccacaccgagtatgaaaagtacgagatacccccggaagcgctggcggatgaacagttcgccgccgttatcgcggaggcggaaaaatatctcggcttcccctatgtgtggggcggcagctctccggctacgtcctttgactgctccggttttgtttcgtatgtctacaacaactgcgggctgcactgggatttcggaaggctcggcgcggagggtctcagaagcatgagcgcatatgtctccccggcaaacgcaaagcccggcgatctgatcttctttgagaagacctataacaccagcggcgcgtcccatgtgggcatctatgtgggcaacaatatgatgctccactgcggcgatcccattcagtacacatcaatcgacacaagctactggagaagccatttcctccagttcggcagactgccttaaccacgcaaagaaggaggatgttatgaacccgagacttgaaaagcttcgtctggagcgcgagaaagtgtctgaaaagctcgccgccatgagcgcaaggctcaaggcgctggacgaacagattttgaagctggaaaacacggatattatcgggatcgtccgtgagaacgggctgaccatagaacagcttgccaagctgatggcgatgctggataaaaagccaacggcgtcgcttcccgatgaatacaggagaacggaggaaattgaagatgaagaataaactgcgttttatggttttgacgattgtcgtcgtgctctgcatgacggcatttaccgttccggcctttgccggaggcggcgattacacggacacgcagacggaggaatcccacgttgaggatacggctgacaatacgcagaccgtaactgtgaatgtagcggaaaacaatgacggaacccgcaccgttaccatcggggatcagagctggacgctggaggacgagccggaaagaagcggcaaggtggtcaacgtcagctcctatctccatctgcgcaccggccccggcaccgattacagcatcatcgggcatctcttaaacggtacggaggttgaggtgatcggtgagacgaacggctggtatgaggtcattgtcccggagaaaagaggttatgtctgcgggaaataccttgaggttctcgccgctgagacgaacagtgcggatgatatggacggactgctgaaaatcctgctgcaatactattctgccgggggaacagcatccccgccgctgaccccggacggcaatctgacgctggtggatgatattggttccgtaaaaggcgcgggcaagcagttcatcaccgtggaaagcaaggcgggcaacaccttctatctcattatcgaccgcgacgatgacggcaatgaaaacgtgcatttccttaaccaggtggatgaagccgacctgatggcgcttaccgaggacggcgacgcgattgtcccgagctgtatctgcacggataaatgcgaggttggagccatcaatgcaaactgcccggtctgccgtaccaatatgacggagtgcggcggcaaggaaaaggtcacggaaaaggaacccgagcccgacgccgagcctgcggaggacaaacctgaaaagggctccggcggttccgggatcattgtggtggttctcctgctcctgctcggcggcggggcgctctactggttcaagttccacaagcccaagaccgataccagaggcagcgatgatctggatgactacgactacggcgaggacgacgatgaggacacggactatgagttcgagaccgaggatgaggacgatggcgcggaggcggcctctgatattcatgacgaaaaggagtaacagaatatgagcaattacagacttgtggtatgtgaaaagccctctgtggcaaagagcattgcagccgtccttgacgcaaagaagcgcgaggacggttatcttttcggaaacggcttcatcgtgtcctggtgcttcgggcatctggcggagcttgccgacgcggacgcctacgatgaaaagtacggcaaatggaggcgggaggatttgcccatcctgcccgaagcgtggcagtacaccgtggcgagggacaaaaagaagcagcttgaccttttgcgcgcccttatgaaccgggacgacgtttccgaggtcatcaacgcctgcgacgcggggcgcgagggcgagctgatcttccgcacggtctactgtctgaacaagtgccgcaagcccatgaagcggctctggatttcctccatggaagatgcggcgatcctgtccggctttaaaaacctgaaggacagctccgaatacgacagcctttacgcctctgcgctctgccgcagcaaggcggactggctggtgggcatcaacgcgacccgcctgttctccgtgatgtatcaccgcacgttgaacgtggggcgcgtggtatctcccacgctggcgctgcttgtacagcgtgaggctgagatcagcgcgtttcagccggaggcgttctacaccgtccatctcagcttcggggacttttccgccgccggagagcgtatgaaggacaaaacggaggcgcagaagcttgcggaaagctgtaaggggcagagcgcggcggtaacgtctgtcacggagacggaaaagacggagaaagcccctgcgctctacgacctgaccacccttcagagggatgcaaaccgtctgctgggctataccgcgcagcagacgctggattatctccagagcctctatgaaaagaagctctgcacctatccccgtaccgacagccgctatctgaccgacgatatggaagacagcgtgaactcccttgttctcttagctgctggtatctgcggcacggagccgccgtctgcggtcattccaaatcaggtctgcaacagcaaaaaggtcagcgaccatcacgccattgtccctaccacggctggcggagaggctgatcttagcgcgctccccgcaggcgagcgtgaaatcctgctcctgctctcccgtcaggtgcttatggcagtcagcgaatcgttcatctacaaggaaaccgttgtaaagatggactgtggcggcattgagttcaccgccaagggcaaagcccttgtccgcatgggctggagggtttttgccgagaaggaaaagcaggacaaaaccattccggcgctctccgaaggacaggctattcccgtatcctcctgtgaagtaaaggagggcaagactacgccgcccaagcatttcacggaagacctgctccttaacgccatggaaacggcaggcaaagaggatatgccagaggacgcggaaagaaaaggaatcggcacacccgccacccgcgcgggaatcattgaaaagctcatttccgcaggcttcgcggaacgaaagagcgcaaagaaggctgtgcatctgatcccctccgccgcaggcgtgtcccttatcaccgtactgcccgaacagctccagtctccgctgcttacagcagaatgggagcaccggctgaaagagatcgagcgcggcgaaacggacgcggatgcgttccttgccgggatcggagagctggtatcttcccttgtgagagagtgcgcgcctgtggagggcgcggaaacgctctttccttcgggcagacccgtggtcgggaaatgcccccgctgcggcgcggatgtcacggagagtaagaatggctatttctgcgaaagaagaagctgcaagttcggtctctggagggataaccgattcctcaccgccaagaagatcagcctgacgaaaaagatggcgtcttcgctcctcacggacgggcgcacctacgccagcggtatctactcagagaaaaccggcaagacctacgatgcgttcatcgtgctggaagacgacggcacgaaaagcagctatcgccttgagttcggcaagtaagaccggcaaaccggagaaaggagcacgttatgcccgaaaagcaaacaaacaaggaacgattgaaagacatcaccgacagcatagagaccggcataaaagagctgtttgaaagcgacaagtacaggcagtatctctccaccatgagccgctttcataagtacagcgtcaacaatcagatgctgatctatatgcagcgccccgacgccacccatgtggcgggcttcaacaagtggcgcgaccagttcggcagaaacgtcatgaagggagaaaaaggcatcaagatcatcgcgccgacgcccttcaaaaagaagatcgagcaggaaaagctcgacccggataccaagcttcccgtgagagacgaaaacgggaacgccgtcatggaagaaaagacgatacagattcccatgtacaagcctgtcgtcgtattcgatgtgaagcagacagccggaaagcccttgccgcagcttgcggcaaacctcaccggagatgtgcagaattatgaggtgttcatggaggcgctgaagcgctccgcgccggttcccatcgtctttgagaagatggcggagaatatggacggctatttttctttggacgatcagcgcattgctgtccgcgagggcatgagcgaggtgcagactgtctgcgccgctgtccatgagatcgcccactccaagctccacaacaaggacgagatcggagagaaataccagggtatcgagctgttcgataaacccgccctgttctcaaacggaagaatcgaccgcgacaagctgccggagggactgtactgctacgacctgcgcggctcagactacgatcccggtatgcccgtgaccatcgaggagcacgtcacggtgaaccatgcggcgtctgtcattaccgcagagcccattgaactgacggagcagggcttccttcatctcggagaggacggtctgaatttcacgggcgatgaaaagacggtcaaggagtttcatcatgcggcgttccccgaaacggcaaagcgttcccgcgccaccgaggaaatacaggcggaaagcatttcctttgccgtctgcgcctattacggcatcgagaccggcgagaacagcttcgggtatcttgcgacctgggcaaaggacaaggagctgacagagcttcgcgcttctctggagactatcaacaagacagcatcctcgctcataacggatattgaccgcaattacgcggaaatcatgaaggaacacggactggacaaggaaacggaaagccttgccgcagaacccgtgcaggagatcaccgtacaggaaccggagcctgtcaaagccccggataacggggatgtgcccgatccggcaatttccgtggagagcatgaacgcctacggctatactgacgccaatatgctgcccttgaccaaggaaagagccttggagcttatggagcgcgacgttaccgtgtatatgctccatacggataacacggaggcgatggcgtttgacgcggacgaaatccgcagctttgacggcatcttcggcatagaagcctccgagtgggaaacggtcaaagaccgttttgcacccgcgcaggactatgaggcggcgttcctcaataatcccgccgatgcctatgccatctaccagcttaaagacggcgaggatacggcaatgctccgctttatggactccgcatatcttgagcaaaaagggcttgccatcaaacgcgacaattacacggctgtctacgccggagagctgaaaacaaccgacgatacgcaggataagctgaacggtctgtaccagaccttcaacaccgaccaccctggggactttcgcggtcacagcctgtccgtcagcgacatcgtggcgctgcgtcaggacggcgtggtatcctgtcactacgttgattcgcggggcttcaaggagctgccgggctttcttaagccggagaactacctcaagaacgcggaaatggctgtggaagacgattacggcatgatcgacggcatcgtgaacaatgggctgaagcagacatccgcagagatcgaagcggacgccatgtccggaaagctggtatctcttctctcctatgtggaggcggtacggcgcgagcagcaggaacagaaggaagcaccgaagccggaaaagaaaccgtccgttctggccaagctccaggctccgctcagcgaaccgaaaaaaacagcacgttcaaaaagtgcggaaagggagatgtgatgatggactttaccaacgatgaactgaacctcatgtgcatttatcagagagacacgcgaaaggagctgatagccgccctcgccgagatgcgcggctatctggacgcggatgaagcggagcttcgtgaactgaccgacagcgccatcggcaagctggaaacgatcacggacgaacagtttgcggagctggagcttgttccggattttgatccggacgaataaggctactgccgcgtttatcaactgcgccccatttcttgaaaaagatttggggcgcgcattttttatgaaggaggaaacccatgccaagcaaattgcaatcgtatatgcagatggcagacgaagcacagcggcagatcaccggaagtcttcagggctggacgagctttctttccaccgccgcacggctgtataagtatccgtatgccgagcaggtcatgatccacgctcagcgtccggacgccaccgcctgtgcagagtatgacttctggaacgagaaaatgggcagatatgtccggcgcggctccaagggcatcgcccttatcgacaacagcggcgaaagaccgaggctgcgctatgtgttcgatgtggcggacacaggacgcaccgagcgcggaagaagcccgtatctctgggagttgcgcgaggaacacaaggacgcggtatccgccatgctggaaaaccgttacgatgtggacggcgcggacggacttgccgatcagcttgaacgcatcgccgcacagcttgcggatgaatactggaatgactaccagcgtgacatcctcgccatcgttgacgattcttttctctatggctatgatgatttcaacgtaggcgtcgcttttcgcagcgccgccaccgtcagcatcacctattcgctcatgtcccgatgcggtcttgacccggagaaacactttgaacacgaggattttctgaatatcttcgacttcaacactccggaagccgccgccgagctgggtacggcggtgagcaggatcagcggacaggtgctgcgcgagatagaagtcaccatcaaaaattatgagcgcgaaaaaatcgcggaaaggagccaaagccatgacagaactgacctacacgaagaacggggactacctgattcccgacctgacgctgaccgagacggaggaagcgagaccgctgggcaagtacgggagactgcgcaggagctaccttcaggagaacagaccggggctgtacagccgtctgagcctgtcggagaagctgttcccgcaccttcgggagatcgacgagacggcgaaccggaggctggagaagatgatgccggagctgatgaggctgaacggcgtgacggaagagctgaaagccagagatcagatgaaatgggtgggcctgatgaacaacctgaaagcgcaggcggaggaaactattctgaacgagctggtgtacaactgacagaggacgcgccggaggcagaaccggcgcaagtaccgcaggcataccaaatgagcctgttcccctcgcaggatgaacaaatcgcatggatcacagaagcggagagctacacgccctccgctttttccacgtttgtcatgcaggaggatgttgaccatatcctccgcatggagggcaatgcagaccatgcccgcatggtgattgcgaccgagttctccaagggcaagagcaccgaggaaatggcggacttcctgaaaaacaccttccacggcggcaacggcattgtcaccgacaatgggcggtattccgtgtggtacgccgaggacggaatccacatcgccaccggcgatgcttcacgctatctgttctacgcaaaggtcgttagctggcatgaagccgcagagcgtatcggtcagcttatggaacagggcgaatatgccaccaatgtggagcttgccgaagcgccggggcatgagcgcatggagcttgcgaagtccctttggtatctgcgcggcgatctcagcgaggaagcaaaaaaacagggctatctctcctgtctggacgaataccgaagcggagggtttcccgacgccaccgcccgtcttgcggaagccttgaaggatacagccttttatcaaacgctcagagacgaatttgccgccttttcctccgcctactctcaggatcggagcctgatgcgctttcacttccataagccgcaggaaatatggacgcagctcagcgagtttcccatggaacgcagagaataccgttcggatatggcggagatcccatctgtcgggagatttatcaccgaggatgaaatctccgcttctctgacccgcgggagcggcattgacggcggaaaggggcgcatctacgcctatttcacagaaaagcacagctccaaggagcaggcggactttctgaaaagcgagtacggcatcggcggcaggtctcacgcagtttccggcgcgacgcacagcggtgaggagcacggcggaaaaggcattgtcctgaacaagcaggactgcccggaggtgcagattacctgggcgaatgtcgccaagcgcatctccgagctgatccgtaaagaccgctttctgactccggaggaaaagacgcagtacgaagagcttcagcggcagaatacggagcgaaacgcgggctggaatgagtacaacgccgtaaaagaagcgcaccccgacgatatggtgctgtatcaggtgggcgatttctttgagatgtacggcgaagacgcaagggcggcggcggagctgcttgatctgaatctgaccacccggaacatcccggatgcggggcgcgtagccatgtgcggcatcccgtcaaaccgtctggagcagtatgtggaagacctgcgggacaaatacgatgtgactatctccgcagtggacgaaagcagccatgagcgccgcacctataccatgctctccatcgaccacgaggcggagcgggcaaccgatgcgtatgaagcggagttcggcgcagacggttatcgtgccttccccggaaacagaccggaggaagaacccgccgctcccgacgtgcaggcgcagcttaataagtacctccccatcgtgaaggatgctgtcgagcaggatgctcgttaccgcaacgcctgtggctatcctgaccgggaaaacgccgccatcgagtgcaatgccgccgtgcgccgcgctgttcttaattccaatgatatggagctgatccgctcattctcggatatgccggagtttcgggagaggcttcatcaggaagcctttgaaggcacctatgaacggctctacgagtttctgcgtccgctttctcaggacgatatagacgacgcgctccgtgcatggaacggagatataaagagcaagcacgcggtcgtccggtatatgcgggatcatgcccgtgacaaagacaccgccgcatggctctcccgtgaatacggcggggatgaaagcaagaacctctttatcagccgcgccgggaacccggatattgtggagctgacgtgggcaaaggtgcagaggcgaatctctcagctcattgaagcggacgatttctataccgaccgggagcgtgacaatctggatgacgtcgatcccatcgccatccgcgaggcgcttgcccagcgcggcatcgtgaacggagagcttgtcgatccggcagcacttgagcgcgacccgttcattcagcaggtaacggctgacgcagagcgcatcgcacaggaggaacaggaaccgacgcttgaacaggcgaaaagcctcataaacgacttctgccagagcgagtacggggacgacgcggatttcagcgacctcacgaagatcggcgtagcctataccaccgtcaccgacgatgagattcccgttcaggtgaacatcgaccttgtgaattaccgcctggaacggtatctggacgacgagcacctggaaacccggcagtacggctctatgcaggagcttattgcaaacgagcttgagagcctggatttcagcgatctggtctatgtttcggacgaggaggttgagcagtaccgcttccacgaaccggctgcggaggaagcggcggagacgcctttcccgtatgccgtgggcgatacggtatatctggaggacggcaagccgttcattatcgagaacatcggaaccttcgatatttccctgcgtgacccgacgcttttctatcccatcttccgtgcagagagcaaggagagctttgaacggctcatggaacgctttccccagccggagaaagacgcgcaggagcctgtgacagaggaagcggaaacggctcccggctaccacaccgagaccgaggctgtctatccggcagaggaaacccgtcttccgtatgatgtggtcattcagacgctgcacatcgacgagccggaaccgccctctcttgaagaggtcatggacggcaatcccatttccgtacaggtaaacggcgagtggcagaccttccccaacagagaagccgccgaaaccgccatgtatgaggaatacaaggataatctccgcagaaatgcacagaacttccgtatcacggacgatgatctgggcgtcggcggcgctaagcgtaagttccgcatgaatatggacgcgatcaacctcctgaaagagctggaatttgacggcaggcaggcaacgcccgaacagcaggaggtactttcgcgctatgttggctggggcggtctggcagacgctttcgacgagaccaaggaaaactggaaaaacgagtttgccgagctgtatgccacactctccccggaggaatacgccgccgcaagagcctctaccctgaacgcccattacaccagcccgacggtcatccgcgccatctatgacgcagtggagaacatgggcttccagacgggcaacatcttagagccgtccatgggcgtcggcaacttcttcgggatgctcccggaaggaatggcgtccagtaagctctacggcgtggagctggacagcctgacaggacgcatcgcaaagcagctctatcccaaagccgacatcaccgttgcgggctttgaaaccacagacagaaaggacttcttcgatcttgccgtcggcaatgtgcccttcggacagtatcaggtaagcgaccgggcttttgacaagctcggtttttccattcataactacttttttgccaaagcgctcgatcaggtgcgtccgggcggtgtggtcgcgttcgtcacctcccgctataccatggacgcaaaggacagcgccgcaaggaagtatatcgcacagagagcggacttcctcggcgcgatccgccttccgaacaacgctttcaaggcaaacgcgggaacagaggtcgtcagcgacatcatcttcctgcaaaagcgtgaccgccccattgagatcgagcccgattgggtacaccttggcgaaaacgcggacggctttgcaatcaacagctatttcgtggatcatcccgaaatggtgctggggcggcagacctcggagagtacgcagtacggcaaacaggatttcaccgtggagccgtatgaagggctcgaccttggagagcagctcagcgatgccatacggaatatccgaggcacttatacggaggcggagctgcctgatctgggcgaagacgaagcgattacagattccatccccgcagacccggatgtgaaaaacttctcttacaccatcgtggacggagaggtttattaccgccagaacagcattatgacaaagcctgacttaaacgccaccgccaaggaacgcgcaaaaggaatggtggagcttcgggactgtgtgcagaagctcatcggccagcagatggacggctttatctcggatgatgcgatacggcagacgcaggcggagctgaacgagctctatgacagcttcacggcaaaatatgggctcatcaactcccgcgccaacgcgctcgcctttgccgatgacagctcctattacctgctctgctctctggaagagctggacgaagacaaaaacttaaagcgcaaggcggatatgttcaccaaacgcaccataaaggcgcatgaggtcgtgacgagcgtggataccgcttcggaggcgctggcgctctccatctccgaaaaagcctgcgtggatatggaatatatgtcacagctcaccggaaaggatgaagaatccctgtcctcagagcttcgcggcgtgatcttccgcaatccagaaaacaaacagtgggaaacggcggacgaatacctctcgggcaatgtccgtgaaaagctgcgtatcgcgcagtcggcgcagaacatgcaggaaggcgattacgctgacaacgtggaggcgctgaaagcggcacagcccaaggatttggacgcttcggagatcgagatacgcctcggcgcaacatggatcgacccggaatatatccgcgaattcatgtgggagacctttgagacaccgttctaccagcggaacatgatcgacgtgaactattccacctatacggcggaatggaacatcaagaacaagagcgcggtcagctataacaatatcgccgcgtatatgacctacggcacggaacgggcaaacgcctacaagattctggaagacaccctgaatctccgggatgtgcgtatctatgacaccaagtacgatgcggacggcaaggagcgccgtgtgctcaacagcaaggaaacgacgcttgcacagcagaagcagcaggccatcaaggacgccttccgtgactggatatggaaagacccggacaggcggcacgcgctggtcacgcgctacaacgagctgttcaactccacccgtccccgcgagtatgacgggagccatatcacctttaccggcatgaaccccgaaatacggctgcgggagcatcagctaaatgccgtcgcccatgtgctttacggcggaaacacgctccttgcacacgaagtgggcgcgggcaagacctttgaaatggtcgccgccgccatggaatccaaacgtctcggtctctgccataaatccctctttgtcgtgccgaaccacctgacggaacagtggtcgagcgagtttctgcggctgtatccttcggcaaatatcctcgtcgctacgaaaaaggactttgagccgaagaaccgcaagaagttctgcgctcgcatcgccacgggcgaatacgacgccgtcatcatcggacacagccagtttgaaaagatacccgtatccatggaacgccagcagcggcttctggaagaacaaatcaacgaggtggaagaaggtctgcgcgagctgaaggaacagcgggccgagcggttcacgatcaagtctttggagcgcacgaaacgcggactggaaacaaagctcaaaaagcttcaggacagctcccgcaaagatgacgtcgttacctttgagcagctcggcgttgaccgcctgtatgtggatgaggcgcatcattacaaaaaccttttcctctatacaaaaatgcggaacgttgcgggactttccactaccgatgcgcagaaatcctcggatatgctgctcaaatgccggtatatcgacgagattaccgacagcaagggcgtggtcttcgctaccggcacacccgtcagcaacagcatgacggagctctacaccatgatgagataccttcagcacgatgatatccgcagaaaaggtcttgcccacttcgactgttgggcttcgaccttcggagagacgcagacagccatcgagcttgcgccggagggcaccggctatcgcgcaaggacgcgcttcgccaaatttttcaatctcccggagctgatgaccctgttcaaagatgtggcagatatcaagacctccgatcagcttaatctcccgacacctacgcccatttaccacaatgaggtggcgcaacccacggaaatccaaaaggaaatggtgcaggagctctcggaacgcgccgcgaaggtacacgcacagcttgtagaccccagcaccgacaatatgctgaagataacatcggacgggcgcaagctggggcttgaccagcgcatcatcaaccccgacctgccggacgatccgaacagcaaggtcaatatgtgcgtgaataacatcgtgcagatctatgaggatggaaatgcggacaagctgacccagctcgtgttctgcgacctttcgacgcccaaaaccgcccccacgcagagagccgcaaagacagcaggcggcaatctggacagccctgaaatgaacgctctggagcgtctcatcgacagcgagaaccccgatgagcccggcttcaccgtctatgacgatattcgggaaaagctggtcgtccgcggtattccaagggagaaaatcgcctttatccacgaagcaaacaccgaagcgcggaagaaggagctgttcgccaaggtgcggagcggtcaggtgcgtgtgcttatgggctctaccttcaaaatgggagccgggatgaacgtccaggacaggcttgtggcgctccatgacctcgactgcccatggcgtcccggcgatctggaacagcgcagcggtcgtatcatccggcagggcaacatgaacccggaggtgcatatctaccgctatgtcaccgaatccacgtttgacgcatatctgtggcagaccgtggaaaacaagcagaaattcatctcgcagatcatgacctccaaatccccggtgcgctcctgcgaggatgtggacgaaacagccctttcctatgcggagatcaaggcactgtgcgccggagacgaccggataaaagagaaaatggacttggacgtggatgtggcgcgcctgaagctgatgaaggcaaaccatcagagccagcagttccgtctggaggacaatctgctcaaagccttccccgaacagatacggcagaacgagagcttcatcgagggctttaccgccgatctgaaaacgctctccgagcatccccaccccaaggacggatttgccggaatggaggtcaagggcgatcttctcacggacaaggacaacgccggagctgctattctggaagcgttcaaggacgcaaaaggcatggagcccgttcccatcggcagctatcgcggttttgccatgtcgctgaccgtggaggacttcgggcgtgattttgtgcttaccctcaaaggcaagatgaaccatcgcgtgacgctgggcaaggacgcccgaggcaacctcacccgtatcgaaaatgcgctgaacgccataccggagcgtatgcaggcggtacaggacaagctcgcaaacctccgggaacaggtggagacggcaaaggcagagctggggaagcccttcccccaggaggaagagctgcggacgaaatccgcccgtcttgccgagctcaatgccgagctgaacatcgacgacagaacgccgatggaacagatggcggaggacgctccctctgctgaaatcgcaaaggcaaaaccgtctgtactggagaagctgaaagccccgatcccacaggcgcactccgaagcgaaaaccaagcatcgggagacggacgcccgataaaaaaaggctgcggcgaagttcaatcttcgtcgcagctctgcttcttgatcgcctgttctttgcgtttctttttctgctcggactttttgttccgtttatcctcaatctcttgtagccatacctttacaggcgctttccacggctcggacttgttaggaatgttcttgatgaggctgcgggggttgagtcccaggcgctttgcccgtgcaatatcttcatcgttcaggcggcagcgcttttttgcctcctgccattgctgttcactgtatgccatttcatcaccaccgataccggtattatattaggaaggagccagaaattcaatatggaaagccagatcaaaatcaaagccactgtcccgcaaatgagcgagttctttgaaaaggacggcggtgttcgctattacgaaataaaagataaacgctattcggaggaagacctgaaagccatgtcggaggataaatacaacagcgaagtcttcacgttttccgtccgttaccggcacatggaacttgaaaaaccgctgaccggcacgttcacgattgacggactgacgaaaaccatggaggcttttaaggatgccgaccgtctgctccatacgccggtctaccggcacaattccgaatacgccagagagcatgacgagctggagctctaccgtgcctcaagcaaagcaaacaccgcctgcaaggaggcaatcgagaaagcgatctccgagcattattacgataatgttctgcacaaggaggcggttacgcaggttgcggagaagtttggatatgagcgtccgctgtatcttttggcgatcaccatccggcagaaggattgggacggacgcttctcaaacgacaacaaggcatgggcgaagaccgtgcccgtcacagaaaaccccgatgcctggggtacggatcgaaactgctatcttgcggtaaacagtcacagcggactggtcgatctgttcacaaaactggcgcgggaggaagcaaaagcccatgagcgcaagccgtctgttctggaaaagcttcaaaagccgcttgcggaaccgaagccggtttccgaaaaaagcaaaggacaggagctatgagcgcgcagtttatgcgccggaacatccgtatctccgtccgtctgacggaggaagaacaccggctgctgaaagaaaaaatggaacgcatcggcgtgacgaaccaggaggcgtttcttcgcaagatggcgctggacggtcttgtgataaagctggacttgccggagatgaagcagatgctctcgctcctgcgctacacgagcaataacatcaatcagatcgccaagcggctcaacgaaagcggcagagcctatgaaacagactttgcggatattctggaaaagcaggaacagctctgggggcttgccaatgaaatccttatgaagctatccgcgattcagtgagtgtgcaggggtgccgggaaaacttcttcccgacatccttgctccgttacatatcttccgatatgatggactcagaaaggacgggattgacaatgaaattcattctgaaaattcttcttgcgccggtcatgctgaccatgtggctgatcgagtgcctgtgcaaactggcgctcaagctctcctccattatctttgtgctggcttctctcctgtttgtcgcggcaggcatcttctacttcacccacggctccgcgctgaaaggatgtatcggtctggtgatcgcgtttctggtctcgccctacggattgccaatgctggcagtgaagctcctggcgtggtttatcgccatgcggatgctgctcaaggagaggatttacggataaagcgaaaacataggaaacacaaatcggcgcaggctcgtcctgcgtcttttcttataggaggctatatggcaactacacgaattatccccatgcacctgaacaaagggaaaacgctggcgcaatgcctggctgaccggacggaatacgggatgaatccggacaaaaccaacggcggcgagctgatttcttcttttgcctgcgaaccggagaccgtggtttccgaatttgcgctttccaagcgtgagtaccgggagctgacgggacgagtacaggaaagcgacattattgcgtatcagatacggcagtccttcaagccgggagaggtttcgccggaggaagcgaaccgtatcggctatgaatttgcggaacgctttctgaagggcaatcacgcttttatcgtatgcacccatacggacaaatcccatatccacaatcatatctactggaactccacgacgctggactgcacacgcaagttttctaacttcatcggaagctaccgggcagtccgcaagctctccgacctgatctgcgcagagcaccggctgtctgttatagagaacccgcagaggcacggggtgagctacaacaagtggctgggcggtcacgacaagctcaccaaccgtgatcttctccgcgtggcgatagacgccgcgcttgagaaaaagccgaaggactttgacgcgcttttggcgcttttgaaatcctccggctataccgtttcccgaaaaggcaggctgtcgcttcgacatgaaaaccagaaaaagagcatccgcctggattccctcggtgaaggatattccgagcaggagctccgtgcggttcttgcaggaggcaaaacgcacaatccgttcgtcaagaagaaatacccgaaacgaaaagagcgtaccacgctgatctcagaaattgaggcaaagctcaattccgggaaaggctattggtacgatcaaaggatgaaggtggtcaagctcaaacagatggcgaagacttttgtatatttggaagaacagggctttgccgatttttccgcactttcaaatgccgccgcttctgccgaagagagatttaacgagctgaaggcgtcgatcaaggcagcggaaacgcagatgagcgagatacagactttgcggacgcacatcatcaactactccaagacccgcgaggtttacgccggataccgcaaagccggatattccaaaaagtatcttgcggagcatgagagcgacatcattcttcacaaggcggcgaagaaagcctttgatgatttcggtctcaaaaagctccccacggtcaagagcctgaacgaagaatttgcgcggctgctgaccgagaaaaaggcggcatacgccgactaccacaagacgcaggaacagatgcgggagcttctgatccacaaggcgaatgccgcttatctgctgggtctggaagaacggaaacagcagaccatagagcgtcagcgggaggaaaaatagcgatggcacatcgcgtagccacagatgaaatctgtgtcaaacggggtatggggaaatccccatcaagccgcaggcgggagctcgtcagagttcccgcctgctgtcttttggctccaaaagaccttgcttgccacgactgaatctgaacatacatagtctcttaccatggtggtctaaatggttatatcgttattgaatacctccggtaagtgtgaattgaaatcaagtggccaatttggacacttgatttttgtattgcctataggcgcgcgacatgacaagatcagcggcttattgtgaaacgctaatcgtcagtaaaagatggagcgagtcattttgtccacctcgaatcaagtgacaagatctgttacttgattatcccacggacaatgcagacgtgggatgaaatcagtgggccattttgacccactgattatcaatcaatgtggagttgtttcattaaaatcaaatgattatctcaaaaaatccccagtttacgggcatttccgcaagacagcagcttgaatttactacccatttactacttacggattgagccttgatatgctttgaagctcttgcggatagaccaaacaggcagcgcacaccagtattgacctaccatagattgaaaaatttcatacagcaccgtacaagcggcgtttcccactccctacacagggagaacaggaacgccgcttttttcatgcccttgttacgcagtaggggcagaaaaagccttgctacaagcggttttgcgggcgcgtatctggcgcggcaagggatttataccttatcccccgaaaccgcgcttctactgcgtaacaaatccacagcaaaaggagtgatttactatggcagttttccgggtggaacgaaacaagggctacaccgtaatgagcaaccaccacctacgcaacaaggagctttccttaaaggcaaaggggctgttgtcgcaaatgctgtcactccccgaagattgggactacaccttgaaaggcttatcccttatcaaccgggagaagatagacgctatccgcgaagccatacgggagcttgaacgcgccgggtatatcgtccgttcaagggagcgcgacgagaaaggacgcttgcggggcgcggactatgtgatattcgagcagccgcagccgcctacgccggatttacctacattggaaaatccaacattggataatccaacacaggaaaaaccaacattggaaaaacctacgttggaaaatccaacgcaattaaataaagatatacaaagaactgacttaccaaaaaaagaaaaatcaaatacggatttatcaagtacccattccattcctatcctttcccctaacccctcaccttgcggggaagcggctacgccgccggaacggaaaggaacggaagcggcagcacagagcgcagtagagatataccgggaaatcatcaaggacaatatcgactacgacattctcaaacaggacatgagatttgacggtgacaggcttgacgagattgtagacctcatgcttgaaacagtatgcaccgcaaggaagcgggtgcggattgcgggggacgactacccggcagagcttgtgaagtcaaagtttatgaagctggacggcgagcatatccgctttgtgcttgactgtatgcgggagaacacaaccaaaatccgcaacatcaagcaatatctgaaagcagcccttttcaatgccccgtccactatcggcaactactacacttcccttgtcgcccatgacatggcaagcggcgcactggcaccgaagaagccgcagtacggcgacccggactattattcattcaaaccgggcgaaagcctgtaaacaacaaaaggaggattttttatggcacagagaacaggagcattggtatttgacgagcgcaccgaccgttacgacatccgctttgacctcaacacttactacgggggcttgcattgcggcgagtgctttgacgtgttcgtgcggggcaagtggaagcctacccggattgagtacggcgacaactggtatcttgtgggtatcagagccgaggacttgaacgggctgcgggtgcgtatctgaccgccgccccataaagaaacgcgaaaggaggacgcgagaaattgcaggacgaagtaaacgaaaagaccatagccctttacatcaagaccgggaagctgaccgcgcagacgctccaaaaggcaatgaaagccattctctcaaagggcaagaaagagctttccaaaccgccacagggcaagcagagcttaaagcagcttatgaagcagaacgcgggcgtttccaacattgagattacaaaagacaatatcaaggcttttgagagtaccgcaaaaaaatatggtatcgactttgcgctgaaaaaggacacgacggaaaccccgccccgttaccttgttttcttcaaggggcgggacgcggacgcgctgaccgcagcctttaaggaattttccgcaaagaagctgacacaggataggaagccctcaatccgaaagctgctctcaacccttaaagaagccgcacagggcagaaacgcggaacgggcaaaagtcaagaacaaggacagggaggtatcgctatgaagccggaaatcaagaagctgcttatcctcaatctcccgtatctgctctttgtgtggctctttgataaagtgggtgcggctgtccggctctcccccggcgcggacgcgagcgcaaagctgctacatcttggggacggttttagtgccgccttttccagtatcgcgccgagcttccacccggcagatttacttatcggcattgccggggcggtcattgtccggctgattatctacgtcaagggcaagaacgcgaagaagtacaggaaaggcatggagtacggcagcgcacgttggagtgcataatcttaagtgtaaagaactctacatggacgcacaggaggatatgcacatgaatgattacaacaaaatcacagccctttactcccgcctttccgtaggcgacgaggacagggacggcggcgaaagcaactccatacagaaccagaagaagtttttggaaagctacgccagacagctaaaattgacgaatatccggcactacattgacgacgatgaaagcggcagatttttcgaccgctccgcctactcccgcatgatagaggacgtagaaaacggtaaaatcggcgtgtgtattatgaaagacatgacccgctgggggcgcgactatctccaagtcggcaacgctatggagatattcagacggaacaatgtgcgctttatcgcggtcaacaacgggatagacagcgagaagcccgacacattggagtttgcgccctttatcaacatcatgtcggagtggtacgcaaaggacatcagcaagaaagtaaagaccggcattaagacgaagggcatgagtggaaagccgattgccaccgaagctctctatggctatgtcaaatccccggacaacaaggatttttggataatcgacgaggaagccgccggagttgtccgtttgatttttcgcctgtttctggacgggaaaaaccgcaaccaaatcgccgtatatctgacgcaggcgcaaatcccaacgcccacattctacatgaaagagcgcgggcggggaacgtgcaaaaacagggcgctcaatgaggataaccgttacaagtggaacaaagccactttgacccatatccttacacggcaggagtattgcggcgatgtagtcaacttcaagactacaaagcatttccgggacaagcggaaccactatgtagaccggagccaatggcagataaccgaaaatgtgcatgagccgattattgaccgcgccgactttgaaaccgcacagcggattttggaaaacgcgcccgtcagacgccccaacggggacggggaaatccaccctttgtcgggcttgcttttctgtaaggattgcggcgcaaaaatgcacatccgcatagattacagaaacggcggcaagcggcacgttgcctattgcagcgagtaccacaagggaaaagccaaaaaccccaaatgccattccccgcacatcattgacgcggacttgctcatgcagaccgtcgcggaagtgctgaagaaaatcgaggactattctatcagcaaccgggcggagtttgaagccttagtgaaaaagaaccttgccatgcagcagaccgaccagaccaaaaagcagcagaagcgtatcccacaaatcacgacgcgccttgaacagatcgacaaggtgctgaacaagctctatgaggacaacgccctcggcactatcccgcaagaccgctacgagcaaatgtcgcagaagtattcagaagaatactacgcattgaaaacggagctttccatactccaagagcagctatccgcttatgagaacgcgggaggacgggcgcagaagtttttgaagctgacggaacgccatgccgcctttactgacctcacccccgccattctcaacgagtttatcagcaggattgaagtgcatgagcgcgaccagaaaagggcgagatacgcaatccagcacatcagcatatatttcaactatatcggcagatttgagaacgaagtaacgcagcttgcagagccgacagagcaggaaatccggcaaatgcgggaagaaatcgaagaagccaaaaaggaaaagagccgcgcctaccaccggaagtattcaagggagtaccgggcgcgaaaccttgaaaagcagcgggagtatgagcgtatcaaggcgcgggaataccgggcaaggagaaaggcgcaggccgccgccgcagcacccgcacagtaaaacagaataccgacaactaagagggattttccgggctacgggaaatccctttttcgcgcccggagaaaggagccgcctatggcagaacagacccccgacagtatcatcacgacacagaagaacggacagaccatcgttgcggaattgtttttcaatcacagcggcacagaaacattccgcgacaagctgctcaaagtgatacttgccgacagcttgcaggacggtcaagagccggaaaaatcggaaattttgcgataacagccgccccgacgatacattccccgtccgggcggtttttatcgtcaaaaacgccgttttctccaagtcaagagccggagaaaacacccgaaaaatgcccctattgcgtaacaggggcgcagaaaggagagtttatgcgaacagggcttcccaagcaaaaaaagaccacagacatctggtttgatgagaaagacccgttgatccatatccgtacccacaataccgacttgaagaagcggcttgccgcctatgccgagcagcaccccgatgtgtgccgccagaccgacgcagacccggaaacgggctgcatggagtttgacattgagaaaggccgcttctctttccgtctgaccgccccatacagcgaggaacggcgggaagcggcgcggcggtacgccagagagagcaacgccgccgacaggctgaaatagagtggaaatgttcatagttttgtgctatactttttctaaaagcagagtaatactgcggaattgattggaggacaacacaatgggttacatttatgagattaagataaaaccgcgagttatgttgcggttatccgtattgcataactcgcttattgaagcagagatgtaattacggaggaaaaacaaatgaataataatttatcacgctttgcagacagcaaggtttattttcaatgcccaatttgcacaaaatcaatggatatacaaggcaatagcctaatttgtagacatggacattgctttgatatttcaagatatgggtatgtaaatttgttgttaaaatcatcgcccaaaaccaactacagcaagcggtcttttgacaaccggcaccaaattttggagtatggcatgtatgatgttgtgttggagaaaatcatacagtttatttctgatacgccatctataagaaacattttagatgttggttgcggcgagggtttctatgcaaggcagatacagcaaagaacagaacgaaacatctttgcctttgacttgtcaagggaggcaatacagattgcatcaaaaaaagacaagcgcaaagcagtgaagtggtttgttactgacttatcaaaaatccctttgaaagacggaagtatggattgtattttagacatattttcgcctgcacactacaaagaatttcagcgattgctatctcctaacggatatgttgtgaaagtaattcctacgaaaaatcatttgagggaaatcaggactaaagtgcaagcacacttgaaaaatccagattattcaaatgagtctgtcgttgaatattttgagaaatatcttaaaaccatttcaagagaaacggtttcagccaccgtacagttgtcatcagaacaaagaatgtcgtttattgaaatgacgccgcttctcttttgcgttgaaaaagattgcgttgattggcgtactctcacacatttgacaatcgaagctgatgttttaataggaatgtattaaagggcgtattgatatttaatattcccatttattgagcagaacggagtaaaccaaacaccctacggtattaagaaattttcctcttttctgccctaaatgtaaattaacgcatatcgttgatgttgaaaaactagaaatcataatcaaaaactctgaaaaacaaactttttaattttgaaaaggaaggatatttaaatgaaacacttacctaaaagtacacctacggaaatattgaatgacccatacggatttacttacaaagaaatgtcggaagtaattggagaggataaagcaagagccttatatacggaattatataaacagccatttcacaaaaaaaatctatcaatatcaacaaaaaaagtctataaaagtagcgatactgaaaagtatgtttatgaattgaaagacaacaggtatatcgaaacggtttttattaaacggcgagatggtgggactgtttgcgttagtacgcaagttggttgttctgttggctgtattttttgtgagtccggacgcaatggttttgttcgtaatctaacaccgtctgaaattgtgcagcaggtcatattgatacgtcaaaaagtaaatcgtatcgtttttatgggaatgggagaacctttattcaattacgacaacttgattgcagcaatccatattcttcgagatagaaatggacttaactttccaaccgacggcattaccgtatcaacagttggtccagttaatcaattaaaaaaattgcgcgaagaacatctaaaaattcagttgacaatatctttacatgcagcaacacaggctgcgagaaactgtatcattcctcatatgcacatgtacgctattgaagatgttgttaagcaagcattgtcctattcacaaaggcataatcgaaaagtggtatttgcgtatttacttttaccaggtataaatgaccgttcctcagatataaggcaacttgcaaaatggtttaagggcaaaaatgttatgattaacgtgctgcaatacaacccgacgagtaattcaaaaattagagcaccacaaaaacaagaaatggttgcgttcaaacatcaattagagcaaacaggacttgaagttaccatgagagtttctcatggtagagagattaaagcagcttgtggacaattagctaatacatataataaagccaaaaaacaacaaaaataatttaattaaaagagccagacgcacagacgcagagccgataatatgcagtttgaaatactgctgttatcggctcttttttgattttaatttgtgcccccaataaccatattggagcaaaatcagaactgttgcttgtcgttctttgatttccgcagcagctttgaaaaatcaaagccgccgtttctttttattttctgatgaaatgacgcggtatcactgttaaaagcggcggctaaaggaggtagccgccatgaagcacataccctatcgacaaaatccgacggtcattgacttatcaaaaaaagcccgaccaccgtcgggaacctctccacccttgaatatgaactgtctaatcatctaaatactacttacaatacctatacgcctgtccgggcttttcggacaggcgtattttgctgctcaaaaaattttttgaaaaaaatccgaaaatcttcggcgtttttttcaaaaggcagtattgccccgcgaaaagggggaagcaccaccaactttccaacgagaaagggggtgagaatgtggaacctaatcgcagggagtttataaaacagtgcgctttccagaagttttgcaatacggtactgcacaatgaagcgtgtgacgctcacaaagagctgcacaggcataaggcaaaggagattaccttttccgacttgaccttagaagaagcgcggcagcttcatacctttgatgaatatttcaaaggggaaaccgcctttgaaagagccgggaagaaaatcacgccgaagctgcttcttgaagcaatccgtactttgccggaagaaaagcgcaaagccgtactcctgtactatttcgagggaatgaacgacaccgagattgcggagctgttcgatacgtcgagaagcacgatacagtacaggcggacaagctcttttgagctactaaaaaaatatctggaggaaaatgctgatgaatgggacgaatggtaacgaacccggctacccggaaaaagcccttgttccctatcctgtcattttggcagcgacaaagggcgacccggacgctatgaagattgtcttgcagcatttcagcggctacatagcccgcctctccatgcggaagctgtacgacgagcgcgggaacgtctattttggcgtagaccacgacattcgggaacggctgcaagcaaaactgatgatggctgtcctcacctttaaggcagaggaataaaccgcagcggcggcgggacgctttctctctcccccttttccgttccgctgctgacgcggcagcaaagccattctgaaccttgacaaagaaagcggcgcaagataacggcggcgcagcatagggcaaatcggatacgttccttttgcgccgagccatacggcgggtgcgccatgacgctatccgggtgaggttatccccacccggacagccgagcgaccaacaccgcgccggaaagcaagtgtagcggcttgcgggcgacgacacgcaaaatatacaatgatacttccttacagccacagtccgagcgttaagagcgtcgcaggcaatgggtagggctgcatgagaaccatgcgggggtgcaattcccatgaggttatgctaataaccgtccgattaaagctctctttctacttttgaaactattgtactctattgaaagggggacattttaatgaatattactgatgtgcctatctgggagaagtacacgctcaccattgaggaagcgtcaaaatatttccgtatcggggaaaacaagctgcgtaaattagcggaagaaaacccggctgccgggtgggtgattatgaacggcaaccgtattcaaatcaagcgaaaacagtttgaaaaattcattgacactttggaagttatatagtgaaatcgagccttgaatgtggtataatagatacaagcatatcaaggctctttccgtcatggaaaggagcatgacgaacaatgtcggagaaaagacgagataacaggaaccgcattttacgcacaggagagagccagagaaaagacggaagatatgcttacaaatatatagatacctttgggaacccgcaatttgtttacgcttggaagttagtacctaccgacaagaccccggcgggaaaacgtgaagatatttcgcttcgggaaaaggaaaaagagatacagaaagaccttgacgacgggattgacacgttgggaaagaaaatgactgtctgccaactctacgcaaagcagataaggcaccgggcaaatgtacggcatggcacaaaacaggggcgcaagcagcttatgaggattttggaagaagatagtcttggagcttgcagcattgagagcgtgaagctgtccgacgcgaaagaatgggctttacgcatgaaagataagggctattcattcaagacaatcaacaatcacaagcgttctctgaaagctgccttttacacagccatacaggacgattgcattaggaaaaatccctttgacttccagttgaacaccgttttagaagataacaccgaaccaaaggtacctctatccccaacacaggaagcgtctttcctgtcctttgtgcagagtgataaagtctatcagaagtattacgacgagattatcatactgttaggaacagggcttcgcatttctgaactctgcggactgactgaaagcgatattgactttgagcataagctaatcaacgtagaccaccagcttttgaaagtatcgggagttgggtatcatgttgaaacgccaaagacaaaaagcggtatcagacaaattccaatgagtaccaaagtctatgaagcgttcaagcgtgtgctgaatgacaggggacgggcagacaattttattgtcggcggttacagcagatttttattccttaaccggaacgggctaccgaaagtagcagtcaactttgaaaccatgttccgggggcttgtgaagaagtacaacaaaagccatgaggaagccttaccgaaagtgacaacgccccataccctacgccatacgttctgtaccaatttagcaaacgccggaatgaacccgaaagcattgcagtatatcatgggacattccaacatcaacatgacgctgaactattacgcccatgctacctctgatagtgcaatggcagaaatggaacggctgattgcttagtagtagatagaggttttactacttgatttactacttttggacgcgaaaacatgaggggaaatgagaatatataagagcttcttccgatttgaaaaatgccggaaagcctgtaaatacaggctataccggcttatgagaacttataaagagatagtcaaaaactatattttgatttaccctaaatcagtgaggtgattcattttgatcaccaccactttgccttatcctctgcatagctatcaggaaagcattctcctgcagtgcgctgcctttgttctgcaaaagtggggtgggtcaaaatgacccaccccaaaccaatgcttgtggtcagtataaaaagctttatacaaaaacaacataagaacatcagcccttcactgttccacaagcttttctttaatcaatgattatgagcggcaagattcagttatcccgtcgcccagtattatagctcaatatcatgcttgtgcgtgggttgttttctgcaagttacagtccgttggatttccctattgcactcactgtaattgtgtgatacaatactatcgacaggttgtcggtcgggggtgtatgaaagaatgcgagtcgtcaaagaagctgaaataagaaaaagcgagatacttgatacggcggagaaactattcgccagcaaaggctttgagaataccagcaccacggacattctcaacgaagtcggtattgcccgtggaacgctgtactatcatttcaaatccaaagaagatattctcagcgctgtgatcgaccgccaggttagctatatggccgcgaaggcgaaagccattgcggagaataaagaaatccctgccctccagagaatcatccttgctgtttctgctataaaagcagatggcgagctcgggaaggaaataaccgagcagatgcacaaaccgcaaaacgcccttatgcatcaaaagacgcaggacgctcttttttcaaaaatcaacccgatcataagcggggttttaaaggaagccattgatgccgggatgtgttcaactgattatcccgacgaagtgatcgataccatcatggtatattccagctatgcctttgaccacacacccgagatccccagcgatgaccacaacagaaaaatcaacggcttcatatacaatatcgaacgccttttctgtgttgagcagggaagtcttcgagagttgatcctaccgttgtttgctcgctaaagcataaaacaggttcacaaccttccgaaagtgacagaaccggttctgaacctgttatttttatcagatgtattcgacaggcagtcggtctaatatagaggagagttgttcagaatgacaagaggtacgaacttcagaaaatttattttgctttggctgggtgagctaatttcttcggtaggtggcggacttaccagttttgggctgggcgtatatgtgttccgcatgaccggaagcgcggcggatatggctatgatatcactgctggcctttctgcctactttgcttctgagcgttcctgcgggtgttctggctgatcgtatggatcggcgactgctgatgatgctgggtgatggctgctcggctctggggctcatctacatcctcatttgtatggccgatggaaacgctgctctctggcagatatatgtcggcgttacaataagcgcggtattctcatcgctgcttgatccggcatataaagcaactatctccgagctcttaacaaaagaggaatacgcaaaagccagcggtttggtgagcctcgccggaagcgcgcgatacctgatttcccccatcatagcggggatgctgctgacaataacagatatacagctcctgctggtcattgacattctgacttttctgctgactgtcatttgtaccggcattgtcagaaaaggcatcgaaaaccacagcaaaaaggagatcaggacccctttcctgctcgaaatgaaggaaggctggcaggcaataactgaaaagaaaggcgttcttgtgctggtaatcatgtcgtccttcatgacactatcgatgggtgctcttcaagtgctttcagagccgatggtgcttgactttgcagacagtgtgacccttggcaccgctgaaacgatttgcgcctgcggaatgctggtatccagtattctgcttggagttatgggaatgaaaaaaggctatgtcaaggtattaggtctatctctctgttttgcaggaatcgcgatggtcgttttcggtgcgcgagataatatcgtgcagatatgtattgcgggatttgcgttttttagtatgcttccgattgcgaactgctgtctcgattatctcgtgcgcgtgaatatccgggaggatctgcagggccgggcctggggcctgatcggatttttgtcgcagatcggctatgtcgttgcgtatggagcggcgggactcgccgccgattccctcgcaaggaacctgtccatcagcatcggcagaggtagcggttatatcgtcatgctgtttggcgcgtttctctctgtgctggcggtcgttacctgttccctgcgcagcatcaggcagcttgaaggaggaaaaccatgaaccgaaagatatggataaacgatctcgtcaaaaacaagcttgcgaacttttcgatatttgcttttttcgcggtatcgagtgttctgtttgcgataaccctgtgtcttacagtgcaactgaccggctccgtatccagtctcatgacggtggctgtaacgccggattatcttcaaatgcacgccggagatattgacgaggagaaaatcacggaatttgccaatgcgcaggaggatgcccgggatttccagatatgcagatttctcaacatcgacagcggcgacatctatctggcggactgttccttgtcaggcagcacgcaggataacggcgtatgcgtacaatcagagcggtttgatttccttatagacatgaatgacaggatacccacgctaaaacgtggtgaaatcggtgttccagtctgctatatgagacagtatggcctgaacctcggtgacagcgtgaccatcggttctaaggagtttgagattgtttgcttcataagagattcgcagatgaactccatgatggcctcatccaaaagattcctcgtttgtccagaggattatcaggctcttttagatatcggcgaagaggaatatctgattgagtttctgctctccgataacgcgaacacatcggttttctccaccgaatacacaaaggcagggctgccgcagaacggaccggccatcaccaaaagcatggtgctgatggtgaacgtcctttcggacggcatcatgatagtgatcatcctttttgtcagcatattggcgctgctggttacattgctttgcatccggtttatcgttctgaccaaactggggcaggacaaaaaagagattggaatgatgaaggcgctgggaatatcacgcaaggaaataagaaagctgtttttttcaaaatatgctgtgatcgcggcggcttcctctatggcggcagtatgtatcgcaatggcgttaagctctccgcttagcaggcagataagagaactgtacggaaatagccagcatgccgccattatggtgtgcatggcgatgctgggatgtgggatagtttccggtataaccctcttgtcaatctggagaatgctcaaaagaacagaaaagatgtccgccctgcaagccctttttgacatcagcgaaaaccggaaaaagaaacgggcaataaagtggtatctgccagcattgctcatagctgccgcaggtgcaatgctgatggtcgttccgctaaacattcacagcacgatttcttcaccggtatttgtaacctatatggggatcggcagcagcgagatcagaattgatgttcgtcagtctgaggatattgcctttgacgcctataagctgagcgaaaagctggaaagcgacgaaagcgtgtccggctttgtccggctcgacaccgtatctataaaagcgttgacagcgggcaatgaagaaataaacctcctggcagagtacgggaatcattcgtatttccccgtcagctattccgaaggaaacgcgcctaatggcagtaatcaggtcgctctttcactcctcaatgcaaaggaactcggcctctctgtcggcgatgagatcagaattatccgagacggcaaagcgatcccctatgctgtctgtggcatctactccgatattaccaacggtgggaaaaccgcaaagatatacgatcctgctttgtcctctaacggttcagagcgagtcatgtggagtatcttctatgtctcgctaacagacggacagaaccgtgaaagttggatggcagaataccaaacgtttggagaaaaaacgtttagagtttcagacatagcttcctatgtggcttccacctttgggcagacaatctcgcagatacgattggctgcagccctttcagtaatctcatcctccatcatcctgtttgttgtactgcttctctttacccggctgtatgttcaaagtgaccggaaggatatttctctgaaaaaggcattgggattccggtggaaagccgtggcaaaagcctatataggtaaatacgcattctccgtcctggccggtatagctgtcggcgaagcgctcggattcctattgggtgaatctcttacaggacttttgcttaaaaaacttggcgcggacgctttcaggtttataccggattggcatagcgtactggtaaaagtaccgctgcttgtgtttgcagtatgtgcggcggcagtatgctgcggcattcacgaagtaaagcggataagacccgaagaatgcgtaacgggaagagaataatacaaggagagaaatgaaatggaaaaagtattagaggttcgcaatctcgtcagaaacggaatcctcaacgatgtttcattcgatgtgaaaaaaggagagctgcttgctatcatgggtccttccgggtcgggcaaatcgacgcttctttatcatgtttccgggctggagcatatcgaagaaggtcaggtcgttttgggcggtgaaagcatcggagaaatgacagaggatgaccttgcagattttcgtctgacaaagaccggctttgtctttcagcagatgaacatgatggcaagtctggatcttttggacaacatcctgctgcctgcatattacgcttgtcatacaaagacggaaaaacgacagaaaaaggagcgggctttagccttgatgaaaaaaatgcagattgattctcttgccgacagagagatatctaaggtttccggcggacaacttcaacgcgcgtgtatttgcaggagtttgataaatgatccggaaattctgttcgcggacgagcccaccggcgcacttagcagaagcaacgcaatggatatcatggcagagctgctaaggctttcagatgagggcacaaccattctcatggtaactcatgacagcaaagtggcaagtttctgtgatagggtgctctatctgctcgacggaagcatcaaaggagaactggcattttctggctcggagagacagtccgaaaaagaagaaaaaatcattacatggctacaggaactgggatggtaatcctcaaagtggaaaggaggaataataagcatggcaagttacaaatataatccggccactgggttgtgcaatatgcacacccatttcaggcggacagtattataccgtaccgttttagggaaaaatggtacggtttttttctgtccttttgacctcaagaagaataatcgtcattacgattcgtgtaactacttgaaattgcatgaaaagtgtgctatactataaaatagattttccttttacaatagattggaggagcgccaacatgcctcacatttctgagtacgatgttgagaccaaatttatagatcggctggagtcgattggctacgaatatgtcgatttgaaaaaatacgatgatgtgcttgcaaacttccgcattcagcttgctgcattcaatgcgcccaagctgacggaagcaaagggcgtggcgtctttttctgatgccgagtttaaccgagtcatgattcacctggacaaccactcggtgtatgaatcagcaaagcttctgcgggataagtacattttgtccctggataatggcaagaccgtctatctggatttcttttcctttgacatcgacaggaacatctaccaggtggctcaccagatcacgatggacccggcgcacaaggatgatgtctcctataaaaaccgctacgatgtgacagtcttcatcaacgggctaccgctgatacagatcgagctgaagcgtcctggcgttgagattaatgaagccatcaaccagattaaccgataccgaaaattctccttcaaaggtctgtttcgctatctacagctgttcgtcgtctccaattccgtgcagacaaagtatttttgcaacgagaacgagatggagaacggcatgtataatcccatcttgaaaagccttgtgtttttctggacggatgagaagaacaagcgtatcaacacgctggaggagtttacctctgaatttttcagaaaagctgctatcaccgagatgatcgataagttcatggtcatcaagtccaccgagccgatcctaatggtgatgcgtccttatcagatattcgctgtgaaggcagcgaagaagcgggttctggaggcaaaccataacggatatgtctttgcctgcaccggttccggcaaaacgctgacttcttttaaactggcacagcttcttcgtgatgagccgcgcattgacaaggttgtgttcctaattgaccgaaaagacctggatgaccagacggtcgatgaatataactccttcgaaaaggactgcgtggataattccgacagcacccatgtgctggtgaagcagctgcaggattcggaccgcaagctgatcgtcaccactatacagaagatggcgaacgcggtgaagtccaaacgctatgaaaagcttatggatgcgtatcacgataagaaggtcgtttttatcattgacgagtgccatcgcagccagttcggtaagatgcacggcgacatcaagcggcactttgcaagcgccaattatatcggttttacaggaacacccatctttgaggccaacaaaggcgcagacggacgcacgacggccgatgtctttaacgcaggacttctccccaacggtgagaaaagggactcctgcctccatcggtacatgatcaaggatgcgattgctgacggaaatgtgctgcgtttctccgtagagtatcagcgcacactgtttgcccacaatatcgccatgaaaggcattgatccggagcagctggacgatccggaatactgtaaacggcacaacatcgatatcgatggtctttaccatgatgaagagcgcattcggaagattgcgacacacatctttgaccaccatgagcagcatattcatccgcagggcaaggatatctacacggctctttttgccgtggattccatcaagaccttggggcaatactacgacatattcaaggaactaaacgcagcccgtgaagatgctgactgctataaggttgctgccattttcagctacggcacgaatgaggatatggacggtaagggcgatgaacactcggcggaacttctgtcccgtatcatagatgattataacggcatctttggtacttcctattctatcgagaccttcgacgcctatcggaaggatatcacgaagcgaatgaagcagaaagacctgccgcaggtcgacattcttctggtagtcaatatgatgctgaccggctttgacgccaagccgctgaacacgctgtacttggacaagaacctcgtatggcatacgctggtgcaggcatacagcaggacgaaccgagtggataaggtcaccaagcagttcgggcaaattgtcacctatagaaatatcaaacaatggcaggatgatgccttgcggcttttctctggcgatggcgatcctaatgaatatctgctggagaactacgagtattacattcaaaagtggatcaatcagaacccggtgctgcgtaaggtcgtaccgaccgttgatgatgcaggacagctaacaaacgaagatgaaatccgtatgttcattatcgcgttccgcacgatggttgggacgctggctacactgaagactttctcaaagttcgactgggctgatctggcagtggttatggacgaggaagagtatgaaggttataagtcctggtatctgtattacaaggatcagacgagcaatccgaatccgaaagtgccggtaccggtggacattgattttgatgtggagcttgtccgtactgaccgtatcaatgtggtctatatccttaacctgctgaaatctgtcaataaagcaggtaagactccggaggagcgtgaggctgaccttgatctgattctgcgtgaaatcgaacgttccgacaacgaatcactgcgggcgaaaaaggacatcatggcagagtttgtgcggacgcggttctacgacttgtctgacgatgccgatatcatggcggcttttgaggcgtttaccagggagcatgagaaagcagaaacggagtcctttgcctatgagcatggcattgattacgccgttgtccatgacatcatggtggagtacatattcaacgggagcatatctgatgaagccattcgtaaacggctgatggcgtatcacctgggacttctgaagataaccaagctgacgaatgacatcaaatcctttgtcagcacgacctatatgaaatacaaagcggagggcgaataaactatggcgattgattcaaataagctgcaacagcaggcagccgatctctcttcccagttgtgggcgattgcgaacgatctgcgcggtggtatggatgcaaatgagttcaggaactatatcctgggcacgattttctatcgttacctctctgagcgtacggagatgtatatgcaggatattctcaaggaagatgggctttcctatgagcaggctttctctgatgcggatttcaagcccatcgtggagcagtggtcgatagagcatttgggatacatcatccgcccggagaatctgttccgtgaactgaatcggaagatcatcaagccgaatggcgatgcagacaagttctccgtagaggactacgaacgcgccgtaaacgaactgaccggctccacgcttgggcataagtccgagaaggcgtttgaagggctgttcaatgatatgcgtctgcaggacacacgcctcggcgataccgtgtcggagaggacggagaaaatcggaaaagttatcgccaagatcggtgagatcgatatgaacctgcaggatcagcagtttgatgtgctgggtacggcatacatgatcctgatcggcctgttccagtccggcgcgggcaaaaagggtggcgaattctttacgccgacaggcccctccaagctgtgcgccacacttgcaacgctgggacttgacgaagccaagactgtcggcgattgcacgtgcggttccggctccatgcttctggagacacagaaacatcttaccaagcagaaagtcggccatttctatgggcaggagaacaatccgacaacctacaaccttgccaggatgaatatgctcatgcacggcgtggactatcagaattttgatatttacaagggcgatacgctgaccaacgatatgtacggcgatgatctgaagctgaccgtgcaggtctgcaacccaccgtactcgttgaagtggagttccgacagtaagtatttggatgatcctcgctactccggcgtcgggaaactggctccgaaaagtcacgcggattttgccttccttcaacacatggtttatcacatggatgagacggacgggcgtgttgcggtgttactaccacatggagttctgttccgcagtggagcagaggaagatatccgaaagtacctaataagtgatttgaatcgcttggatgccgtaattggtcttcctgcaaatctatttcatggtactccgatacctgttgttatccttgtgctaaagagcaagcgaaatgggaacagcggagatgttatttttattgatgccagtcaagaatatatccaagggaaagcgcaaaacgaaataactgatgcacacatagataaaatcatacaaacctatgttaaccgtgttgacgtggagcgttatgcccgtgttgctacaatagaggaaataattaagaacggttataacctgaatattccaagatatgtagatacatccgagaaggaggaagaaatagacattgcaaaggtaaaggcagagcttactgatatcacagtaaagaaacaggcggccattgataaggtcaacagcacaatgaagctgttgggattgtgaggtgatgctttatggcagaaccgagagttagattcaggcagattgacggaaacggttatcctgcatggaaagaagtaatgcttggggatattgctacgagaataacacgaaaaaattctcggaatgaaacagacaggcctcttacaatagcgtctatcgagggacttgtagatcaaagaacatattttggcaaagctgttgcaagtaaagatatgtcagggtattttctgctgaaaaaaggcgagtacgcatacaacaagagctattcggctggatatgattatggttccattaagcggttggataaatatgacaagggtgccctgtccacgctttatatttgttttgcgttaaatgatggtgagaacagcgatttctataattgttattttaacggactcagttggtacaatcagatgtcaaagatatgcgctgaaggggcaagaaatcatggtctgctaaatgtatccgtaaatgagttctttaagattaaactaatgataccgtcttcttttgaggagcagcagaagattgcagatttctttggctctgtggatgatgtaatttcttcatgtgaagctgaaattgaaaatctggagatgcaaaagaagtcagccatgcaacagattttttctcaagcggtgagatttaaaaagcaagacggaagtgaattttcggattgggttctgagaccgttgaactattacttgtccgaaaacaaagaaagaaacaaaagccggcagtacaccaaagaggatgtcatgtctgtatctaaagattttggcgttattaaccagattgcatatttaggaaaatctctggctggtgaggatttatcaaattatcactgtgtatacaaaggaaatgttgtttatacaaagagtccattaggaaaacagccgtatggaatcattaaagcaagtaaagtggatggtatagtatcaactttatacgcagtctactattgtaacaagttggcattgccggaattcattgacttatatttcagtagagatgcagagttaaacaactatttgaagccattagttaacatcggggctaaacatgacatgaaggttaataatgatgttgccatttcaggaatggttacatttcctactgatatagaggagcaacgccttattgtagatttgtttgctgatttcgatgaggcaatcgcagcggcgaagcgtgaactggaactgtggaaagaactgaagaaaggtctgcttcagcagatgttcgtataaagggaggtggcctgagatgtcacgagaaaagaaagacgctaaaaattttgcctgtaaattcgaccgggagatttttgagaaactggaggaattttgcaagctctccggacagaacaagactgccgtggtcgaacgcgccgtggagaaatacatcgaagaaaaccttgagatgatcaaggaagtggcaaagaaactgtaacacagtgatgcagataaaggaggtcgcgggatgaagcgtatatgtttaggaacgatgattacgcttttataccagagccgcatgcgcagtgctgacaagatcaaaactgtatgcggtgggatttttgcggcctttgggctgaatatcgacaactacaacaaggaactgccaagccatttgaagagcggacacgatcctgttcccggtgatctgatcgatgcagccaggacgctttcgattgaggacattgacagaggctttgaggaatatgtgctgccactgatccacaacgaaaagcacgaggcggttttccgtgctataaaagatattctccgtgatgacacaacgattttggatacgaccgttgtcggcaagatggctggatttgagaaagaaaatattttgcagcatgactctttcgatgaatccgctctgcttgcgaatgttgttacctacgcgattacaagcgtagaaaacgaaaaattgggtgcgaacatccgggaaattggaacgggctatgtggatggatttgttgggatgggtgaggatatattcttcatcagtccgattgttgatcaggatcaggtttccccgctgaagcggacgctgaaagatccgctgtttgaccacatctttcaaaaggcaacggatgtgaccatatccgggatgagcaatccggcgagggcgtgtgtattttatatcgatcccaacaactgcaaattcagattccgtgaccttaaagactttatcatcaacaatatcggcagttatgttttctcaagggcacagacaaagcggataaccgacagaaccaagaacaaggccgccgtgggatcgcaggccatgctgaagttcatgcagaagtatggtaccaatgcggaaaccgttctcggtgagattctgctttacatatttatggagcaggaacttgacgctcctaagatcatgagcagaatcgaactggacgaatacaatcgcggtgtcgttagcaaaagtgatggcgtacatctcctatccctgaatcgcactgggcagccgtttcatcagcttgtgttcggtgcttcggatattgtcggtgatctgtcggcggcagtagaccgagccttcgataaaattataaatattgaggcaaatggcgatgacgaattgcggatggtagaaagcaccacgcagtggacaatttacgatccagatgcaactcaatatatggttgaattaatgcgtccgcaaaggggtggctcctataaaccagacatggcttttggagcattcctcggatataccatccaacttgatacgccggaaacggatagccagagatataaaaccgctgtcaagaatcagctgattaaggatattgctgcggtacaaccgcacattacagaccttatcacaagaaatggcttgagcggatacagtttctatttctatgtgttcccgttcaatgatgcgccaaatgaaaaagtcagtatcattaacgagttattgacagggggtgtcgtttaagtgattcaaattccaagaaatgcaacccttgccgaagcgctataccgtgatattgacaaggatgaatatctccaagagatatacggggatttactatataactactcaataaagctcttcggttcccagcggagaccgagggaaatgaatatcaaggatgctttgcgtttttccgatttgttgtcaaaatcggcgcatacgccgactgccgatagagacaggctatggggacaggaaatcgctatattgcttcgccttttatatcccgaagatgaaaccgtgagatactatctcggatcatctctttcggctgttggcaatttcagagggcttcgctcaaaagcggtaggtgaatattccagtgctgatttactcgaccagattttttatgagtacgacatggacgagcatagaatccccggcaaggaagaggagtatttctttcatgaccagatgattgtttatcgtggcatggataagaagttttttagttattccggtcccacgtcaatgggaaagtcgtttgttgtacaaacgtatgtgcaggaacaggtaaaaaacggctccacggagaatttcgctattcttgtgccaacgaaggctttaatcaacgaggtaaaaagcaatctgataggtgcgttgcagggaattttaaaggaaaaaaattaccgtgttgttacagccgccggagatctggttctgcagcaggatcatcattttatttttgtaatgacaccagagcgtctgcatcacatgatgattgagcgggataatattcgtattgacttcctgtttatagatgaagcccataagatatctacccgtggcggaagaagtacatattactttaaggtgatgactcagcttcggaaaatgcagcagctccctacgattgtgcttgcttctccgaatatcccaaatccagaggtctatctgaatattatccctggaggcgaatttggagagatgaatcggttggcgtcccgttttgcacctgtttgccagttcaagtattacctggatattccgtcacggaagggatatttctttaatgattacaagaaagatcgggagttgtgctatacaattccggagggcagcaagctcagcgatatcgttagaattgtaggcaaagatgaacagagccttgtatattgcagttcaagaaggtctgtcctggaaaacgccgtcagatatgcaagcaactttacgccaaaaaatgatgagaagttgaatgctttagccgccgagataaaagccgaggtgcatgacgattgttaccttgcggatctgatcgtgcgtggcgtggcttaccatgtgggctatctcccggcgaatatcaggctgcgcatagaacgcagttttgaaaacggcgatttgagaaccatattctgcacgagtacgctgattgagggagttaatcttcctgcggacaatcttttcattaccagctaccgcaacggaccaagcaacatggatgaggtggagttcaagaatctcattggacgtgtcggcagaataaaatataatctttacggcaatgttgttcttgtgcgtgaggatgataagctgaaagaggatcaatatacaaagctactgaagtcagatgttcccccgcaggagctgtccattgatattaaatcaaatgccaaatacatggatgcgctaatccaggatcttgcggacggcgatatagagatgagcacatgccataatgcggcaacagaaaccgattttgaggctctgcgcaaattcggactcatatatacacgagatttggcaacgggcgatgttacgccggtaacagagacctttgagagatatgttgatgataagcagaagaagcgtattattgataactttccgatcgagcggacaagtgatgacattaccctttcctacgaccaagcagagagtctgcgcgatgccattgcaagcgggctttcctacccggtattgacaggcgaggatgacgaggtcgactttgaaaatcttgtcacgtttatgatgaaactgcgcagcgtgttcaaatgggatatctacgaaaagcaaaccatcggtaaaccggggacgcaaagactggattccgtcatcagatggtattcgacgatactgcttcgttggattcgcggcaatggtctgcgagctcttgttggaagtgccgtgaggtacaaagaaaataatccggaaactggtgtctggtcagggcagtataaggtggcggatcggtatgatcccaagtcaaagtaccataagaatttggtgattgctgaatctttgagcgtaatagaaaatgtactgctgttcagtatctccaattacttcagaaaagtgtcgatggagtataaggcatatcataatgtcgatcattttgataatgactggtatgaatatgttgaatacgggacaacaaacccggatactatttttctccagcagaatggcttttcaagggaagcatctatctttatccagaagccgtccaactataacaagtatgtaaccgaggtcgatggcgagaagaaaatcaggcgaagtattctcgaatgtgggaatatcggtgttgaaaccgaggcacaagatatacaattcaatatcccggaactgtttgtggattaaagctactcaacggcctcctgccatgtgcgggaggtcttatttttttgcccattttgaagaaaaaaacattttcccaactctcccccaagtcctccccaattccctcccaagtgagcatatttcagtcaccacagcccttgagtaaaatgaaattagccttaaaacaaggcgatttcaaacgaggtcgaggtgattgatatggcaaagaacagcaagcaaacttcaaagtctgttgctacgaaagcaagcagaattttgaaggacggccgctacggcaaagactcaaagtccgttgccggaagtgccctggctcagaccaagccgggtaagaaaaagtaaggtcaccattcgatgggcggtgacagattaatcaatcagctcgcccatccctttcggggaggattgcaaatcaagcctcttagtctgaacggtcacataaggacggagggtacataagagttcatcacagcgataatatcgacttcgtttaaaacgaacatgttcccactgtagaaagaaaccgtcagattttcccttctcccaaggctacctgataggagctggacaaacaaggtaacaagcggacagagcgcttttacataacaaaatatctcaatgcctgattacgtataagggcaaaggatacatatatcggacaagctgctgcggcagcgaaagtgcgatatggagtaccctttcttccttatacccttttgcaggttgtaaggtcggagcggttccacaagcactccggcctttatctgtatctgatgcccttttcccggaaatcaggggaaaggacttttatgttataccgctggctttgttatatcgccaaatatccgtaatctccgaatttttgactttcacccaaattcaaaaattcaaaggagattacgacatgtacaagtcaaaagaattcgattatgacctctggactacgcaggagggcggcataaaacgctattgggcaagagttaaggcaacgggcgaagtggctgaaatcagtattgagatcatgagatgcctccgcgcggaagaaaaaagaatctatcgggaaatcgaggtttcccggaaacgcgggacgatgctctctcttgagtttctcaatgacgaagagaaagacggatggcttacggaccatggtgtcggcgcgagtgaaatggaaaacattttgacggaagaagcattccggcagttgctcacaccggcacagctttctgtctttaacgaatgcctcatcgaagggaaaagccaaacggcgtatgccgcgatacacggaataagcgtccccgtggtcaataagcacatccttgccatcagaaaaaaaacaaaaaaatttttcggcaatgggtaaaaaagcttcctgaaatgtccgttgtagggtgagaggacaatctcaccgcgagggatatggagattcggttttctcagagctacacagctcagggcactttgaaaactgaatatccaggcatcaggtacgttcctgttgttcacgagccacggcaggcggagcgccacgacctctgtttcagagcgagcgataaatccgaatcctgcgagagccggattgctcccggcttggccatgactgacacagggttaatgatacttccgtaattcgcggcccggccacaatgaaggcggggaggttagagtcctatggagcggtgcagcacaccgccgcctgatgttctcccccggctctcggggtgtcgaggacaaatagagagccgtacatacccgaaataaaccaattcagatagacaggagatcgcaaaatgaactaccaggacagatacaacagtgagcggtatctcgacatgaccgcttatctggctttacgaaatattgaacgagaagaacggaggcttcgcatgagagaagactggatttaccgcagaggcgatgtgtaccttgccaacctcgatcccttcataggctcggagcaaggcgggacacgtccggtggttgtcttgcaaaacaacaccggcaacttctactgccccacgcttatcatcgcgcctatcacttccaaaggcaacaaaaagaggtcgctgcccacccactactacgcggaatacattcacggtctggaggttccgggcattgtgcttttggagcagatcaagaccatcgacaagcggcgcatacagaaatatatgggaagaatgtcccgacagcagatggacgagatcggagaggccattgaagcggcgcttggcttatatgtccccgaagaaatggaggctccatgatgaatcccgtgttgaccattgatccggagtttgaggcaaaatgcccgcctctgaccgaggacgagctttcgcagctcgaagaaaacatccttgaggaagggcttgtgctcatgcccctcatcgtgtggaacagcacgattgtggacggtcataaccgctaccgtatcgcacaggagcatccgggcatcgagttccgcgtccatgagaaacacttcaatagtaaatacgaagcgctttcctggatttgcaagaaccagctcggacggcgaaacctcacgccccagcagaagaaatatctggtcgggcaacgatacaaagcagagaaacaaatccacggtggcgacagaaaaagcgagcaggcaaaatcaagttcccaaaacgggaacttgatttctccgcttaaaacttgcgaacgtatcgcagaggaaactaataccagcaaaaactatgtaattcgtgcagaacacttttcggatggaattgacgctgccgaagaagtccttcccggtatcaaaaatgatctgctccttggcaaatataaaccaaaggaagctgatgttgtggctgtcgcccgcgcttctccggaggaacgccgggaaaaggcggaacagctcagggcaatccctgaaaagcaacccaaaaccgataagaagtctgcgcggagcggtacaaagcgccagcaagaggcttatgcgactatcgacaaaagctacgaggatatgaaggccgccaagcgcgtcacagaggattcggcattggaaagcctgagctacacagcgaagaacatggtggaaacctgcgatgtactttttgacaatttccccggcttattgtcaaagccggactacaaggctcaggtcattgaaatcatgcaggagccaaaacaatacattctcaaattggaaggagaaacagacaatgaacaacattaagacactctacaagctgatagaagtcagcagccgggatttggagattcccgatgcgtaccagcgcaagctgaacaccgagcgtgtggcaaagatcgttgccgggtttaacgagcgtatcgccaacgagccaaaggtcagttttcgtgacggtcactattatgtgtttgacgggcagcatactattgtggcgcgcaagcacatgaacggcgataaagacctgccgatcctctgcaaagtgtactatggcatgacggaagcggaggaagctctgctgttcgccatgcagaccggctactccgcagccctgacgcccagcgcgaagctccgcgccaatcttcacggcgaggacaaggcgtcgggcgagttttacgaggcgaccgaggaggcgggctttcatgtgggctttgagcgcggcggaggcgtcggacgcatcatctgcatcaataccgcctttgcggagttcaagcgcgtcggcgcagagatttacaaggaagcgctgaccatcctgctcgaagcatggggcggtgatcccgattccctaagagcggagatcattcagggcattgtccacttcgtggagctctatcacggcgagtatgaccagaaccgcctgatctacagcctccgcagctatgagcccaatctcatctatacggcaggcaaggcagaaaaggagctgcgcggcgtgaagcgctacatcaacattttctaccgtatctacaacggcagacgcaaacacgatattcttcccatgaagttttaaggggagaatcgcacagacgggcaggagcggctatcaccctcctgcccttttactaagcagaaagagaggtatctatgcttcgacctgaaacaaatatacgaaatattgacagatcggcgctcaagcagcgaagtagcgtgaaaatccccaaggacgctccgcgtcatgaacgcatggcggagctgatgcgtcagatcgacccctattgctatcttgacggtgatgtggtcgtgatctcccgtttttccgatactgacatttccatcaccgattgctgtaaggcttaccttgccggactgtgaccggcgacatcattgcgaagtaaagaggtgatgcatacaatttacgtgaaagacgaggtgaacccaaatgaccaagaaggtgtacagaaccgctatttatgcccggctgtcccgcgacgacggagacaaagccgagagcaactcgatcatcagccaaaaactgttctgccgcgaatacattgagcagcacagcgagctggagctggtggatacctttgctgacgacgggcagagcggcgttagcttcgaccgcccggagtttcgccgtatggaacaggcgattcgtgacggaaagatagattgtatcgtctgccgtgatctgagccgtttctcacgaaactacatcgaagccgggcggtatcttgaaaagatatttccgcagctcaatatccgcttcatcgccatcaacgattcttacgataacgccaacggcaacatacagtcggattcctttatcgtgccgttcaaaaacctcattaacgacacctactgcaaagatatttccgtcaaaatccgcagcagcctggatgtaaagcggcgcaagggtgaatatgtgggagcctttacgccatacggctatcgcaaggccgagaacaacaggaatcagcttgtggtggacgagtatgcgggtgaaatcgtgcgctttatctttaccatgtacaaggacggcgtcagcatcggcgctatcgcagacaggctcaacagcatgggcgttctctccccgatggaatacaagcgttctcagggcagcaactttgagagcgcattcaaagcccatgaaacagccctgtggtcttatcttgccgtcaggcggattctcaccgcgcaggtatatatcggggatttggtacagggcaaaacaggcacccccaactacaaggtgagaaagctcatgaaaaaagacccatcggaatggatcgttgttgaggacgcgcatgagccgctgatctcccacagtgatttttccgccgttcagattatgcttgcgcgtgatcgccgagcctgcggtgatccggaaaacgcgggactgttctccggttttctgttttgcggcgactgcgggcaatccatggtgcgaaagaccgtcccctccgcaaagaaaaagtacgtctactatgtatgcgccgcttccaagaccggcggttgcagcacccacagcatcagtgaagcgaagctgacgaaagccgtctttcacgccattcacgatcagattgaaattgtgctggaacttgaaaaagcgctggaatatatagatcgtctcccgtcaatggacaggaaagccctcacccatgaagcacagatcgcaaagcttgaggaagaaatagaacgctgccaaaggctgaagctccggctctatgaggatttggcagacgacatcatagataaagcggagtattccgagttccgggagagctataccaaagcgattgcacaaaagaaagaggctctgagccgtgtgcgccgggaatacaaggatacgctggcaaacggcatcacggagcggaattgggtcactcttttcagggagtacgaaaacatcgatgagctgaaccgccgtgtactcatggcattggtggataagatcgtcatccatgaaaaccatgtgatcgaaataatctataaataccgtgatgagtaccaaaacgccaaagagtatgcggacagcttctatgatgaacgcagcgccgcgatgtaaaggaggaggataaaaatggcgcgaaccagcagaaaaaagataacagaggaaaccgtacaggcggtatcgctgtcacaggtctttcctacggcgatttatgcgcggctgtccgttgagaacagcggcaaagacgatgagggcgcagctcttgaaaatcagatcgcggtatgcgaggagtatgtaaagtcttgtccgcatctggagctgattgagacttattcggacaacgggcgaacgggtactgtctttgacagaccggcgttcaaccgcctgatggatgacatacgctgcggcaggataaaatgcctggtagtccgcgatctcagccgcttcggacgcgactatgtggagaccggaacctatattgagcgtatatttccccagcttgatgtacgttttatagccatcaaggaaaactttgacagctttgctaccgacggttcaaacgaatccctgatgatcccgctgcaaaatctcataaatgatctctattcaaaggacatatcccgcaaggtgtttacggcattgcgcatacagatggaaaacggagaattccgctggcgcaagctcccctacggatatatgtggaatgaggacagaacaaatatcattcccaacgaagctaccgccccgtttgttcgcagcatttttgcgtggaagctggaaggactatcattcacgcagattctggacagactggaagcggcaaacgcgcccattcccgaaacactgcaaagagtggacggaaacatggatggcgtaaacacggtatgctggtcgaaaagcactctgtttgccatcctgaaaaatccagcatacgccggagactttgccgttggcagaaccagaaaggccatctacgcaggcataaaggaaatgcaagtcaaaaaccccgaggaatggtatatcacttcggacgctcatgaagggcttgtttccagagaaatctttcaggcggtacagctcatgctggaacaggcggcagatgagcggaaacggaagatggaaaagagcaaggcaatccgcgaaacgctgatagacctatttgacggcaggatattctgcgcggattgtcagcagaggatgtacttccatcggcataagatcgacaaggacaagcgcggacgctggttggcatactatgagtgcagtacctatacgggcagacgggcggtgcgctgcacggcgcacagaacgcgctccgagctcatagaggaaaaagtcctccatgcgttgcagctccatatacaggcaacgctggactatgagctgcttatctccaagctgaacgagagcagggctgacaggaagatacgaaatgagtttgataaaaatattcaaagcgtgacgctgaagctgagagctatttcgcagaaacgagcgcggctttacgaggattttgctgacggcatcctgtccgaagaggaatatgcctacgccaaggcctccttcgacggacggtgggaaacgctgaaccgccagcttgacgagctgacggcaaggagaaatcagtacagcgaaaccatgtccggagaaaaccggtggatcaagcagatgaagagcgtggaggtgacggacacgctgacacaggccatcgtggacgccacaatagaaaaagtgttcatccatgaaaataagaccgtcgagatcattttcaaatatcacgacattttcaaacagacagagcggtatctggaagagcttggcgcaaaggagggcgaaccgacatgaaggaatacaacatagcaatctatatccggctctccattgccgatgaagacaccggtacatccaaggctgagagcgacagcgtaggaaatcagcgcagtctcatcaaccgcttcctggatcgccatcccgcgctctcaaagtacccgcggtcagagttttgtgacgatggttttaccggcacgaataccgaccgccccgcctttacggatatgatgaaccgtgtcaaaaagggcgagttcaatctgatatgcgtaaaagatttttcccgcttttcgagggattatattgagatcggcgacagcctcgaatgcctgtttccgttcctcggtgtgcgctttatctccgtcaacgataactatgacagcgacaattatataggcacaacaggcggattggatgttgtcatgcggaacattgtttacgccgcttacagcaaagacctgtctatgaaaacgactacggcaaagatacagctcatgaagcagggcaaatttgtgggcggctacgcaccctacgggtatgtactgcatccgacaatccgaaataagcttgccatcgacccggaggcggcggaagtagtcagaaagatatttctgcttgccatagatgggaacacgcccacggagatagcgatacggctcaatgacgagggaatccctacaccggggcagtatttcatagagcgccaccctgacacgaagaaataccggcgttcttccgataaactgaactggtctcacgccatggtatatcggacgctgaccaagctggtttacactggctgcgctgtcgggcatgaacgcaggactgttgctccgctttcccgcaaaacggtgaagcaggacattgaaaagcagtttattgtggagaatatgcatgaagctatagtgagccgcgaggaatacgatcaggcgcaggctgtcatccgaaaaacagggcgctcaccgtcaaaggcgtcatattacccgctgcgctcccttgtccgctgcggcaactgcggaaggtgcatgactttcttgaaaagcaagaaaggcttccgctgtacttacggcagaaccgacaggaacagcgcgtgtcccacagaagccatccatacggcggcagatatcgagcagcgcatttatgacgccattatgcttttcttaatggctgcgggcgaaaagggcaatctgtctgataagcttctgaaaaagaagaagtcggagatacagaagaacatggacatgctgacggatttccaaaagcagtgcgggaaactgaaaaaacagaagctgaaaagctatgaggagtattccggtggcgcaatcacaaagcaagcctatcttgatgaaaagcgcatcatagacgaaaagctccgcaccatcgaggacagcatagctgccgcgaaacagcgcattgccgacttggaatccatggaggagtccgagccacagacatcacagtttgatcgtttccttaacgagccgagccttacctatgatatggctcacgcctttgtggaggctgtttatatctaccctgacggcacgactaaaatatgctggaagttcaaagacttcaccgaaagcaacctataaggcataaatcagacgtgatcgcagccgagaaaatcccgggctaacaacctgggattttctctgggaagcgatatatttttttagtcttttacttacacgagcagacctttcccggctgggccgtaactacattgaggtcggcaagctgacggaagagttctttccgctccatgatgtacggctggtagccgtttccgatggcgtagatagtgacgagggcgaggacgattttaccccgttcaaaaacattatgaatgaatactacgccaaggacatctccaagaaacgccgtatcgtcaacaagatgaaaggtaattctggtgtaccgctttccccgccgccctatggctacatcaagaaccccgatgatccccgcttttgggtcgtggaggaagaggccgccgctgtggtgcgccgtatctatcgtatggcgctggatggcttcggccttgccgagattgccgccgcgctgggtgcggacgggattgtaaatcccacctactactggcggagcaaaggaaccaaccggggcggctccaaaagtacgctggagcctaccaagtggggccacaccaccattaagaaaatcctcaccttgcaggaatactgtggcgatgtgatcaacttcaaaagctactccaaatcctataagatgaaaaaacggattgagaaccccgaggaaaatcgggcgatcttcctcaatgtgcatgaggcaatcattgaccgggccacttgggaaaaggtacagacgctgatgaagaatacccggcgcaagcgtcccagcgttacccaagagcggagcgcgttctccggccttttgaaatgtcccgagtgcggcggcaatctgaacttccacttcaatcagaacaaccacgatattaaattctttagctgtcagaaccacaattccgggcttcgcaaatgttccaccacccactatatccgactggactttctggagcgcgtggtgctgtacgaggtcaagcggctggcctgcttcgccaatgagtacgaggacgcctttataaaggctatggtgggccgctccgcaaaggtggcggagaatgaccgtgtacggaaacggcgggagctggacgctctggtggcccgtgacaaagaactggatgccctctttgaaaggctctatgaggacaacgtaaacggcaagatcgacgatgcccggtttgccaaaatgtccaagcggtacgaggaggagcaaggcgaaaactccaagaagatcaaggccctgcggctggagctcaaaaagcaggagggcagacaaatggacgttgaccagtttcttgaaaccgtccgacggtacaccgatgcaacggaaattacccaacgcatggttgccgagctgatcgaccacatcgatgtgtaccatgcagaaaagaaagacggcattaccacccagcgggttgtcattcactataactgtgttggcgcttttgaagtgcctgaccgccgcaatatccccgaggaggacatcctcatgcaaacaagaaaaggcgtagcattaagctacgccccgtcacaaattgcggtatgaatttttgaaataaaaaatgcagagtgtccattacaggatactcagatcccataaggacactctgcatggtcaaagtattataatattgtttttgattcggtatcgggtttagccagtttagatggtggccccgatttgagccgtgtaggttctcatggtacgacagcctcgcaagaggtgcaggaagcatggagtgctgctaatgctcagaaaaataagtataaccaaattatttcggctcttaatgaagctgccaatatagaagtagaagttccggattttggaggaataggcgcaaataaatctggttctggcaaagacaagaaagaaaaagaacccaaaacaaaagattttgactggatcaaacgtcgtcaggaacttcttcaaaaactccatgatcaggaacagcagaatgcaaatgatgaatctgtatcctatcagactcggattgcgctaataggggagttaatcgaaaaagataaggaacgtcttgattttaatgaacaagcagccgcatcatatactaaagtttggaaagatgctcaaacaaaaatacttgaagaagccgcaaaacaggataaagatggtcatgctattatttcaagtatcaaaaatggtaacatagaaaaccaaactattactgacgattcacaagacaagcatctgattgacgctgtacaggccggtattgatgcctatgatgattttaccgctggacaggaaaagtcagccgaaatcaataaggaaattacagatcatttaaaagaacagcgagaactaaaattacaaattgcacaagcccaaattgatattgtaaaagctgaacaagatagtcttgcagcagaaatcaaattaatggaagcaactggtaaagcaattgatgaagggcaattgaaaaagcaaattcgtctatcagaggacttaacagacagctattatgatcgaattagtgcattggaagatgaacttggcgaagtagatgaagagtctgctgaatataattcaataatgtctcagatatatcagtgcgaatcagctattgccgattgtgcagttcaacaggccgaatggaatgaccagatcaagcgtcttcctatagaaaaaatcagtcgtactctggaaatgctcggtttcatcaaagaggatttgcagaactttattgaccagcagaacgcacttggtaaagcaacttctcttcctcagttccaggagatggctaatattaatattaagcagcttgaagagctcatgaaacaacagaagcttctaagtgaccttttaggagattatgaatttggttcaaccaaatatcaggatacggtatctgaattacaggatatagacaatgaaatatctagtcttatccagaatcagtacgattggaataaagctattctccagcttccaattgaccagttaagtaaagccggtgatgttctgcaaagtgctgtatctgccatggaggatatattatccggatatgaatctgcaataagtgctgtaacgggaaccctagataagcagatcaaggcaatcaatgacctgaaagatgctactaccgatgagtatgaaagcaaaattaagcctttacaagacgaactggatactctccagaaacagaatgaagccagaaagattcaacttgatttggagaaggctcaatccgatctggacagagctaatgagcaaaagacaaataaagtagtaagagaaggggaagtggaatacgaagccgatcaggatgcagtccgtgccgcccaaaattcaaaaaatgatgctgattacaataaaacagttcatgatctggaaacacagatttccggcctagaagaagaacgagacaaactgctcaaaggttacgacgatcaaatcgaaaagctcgatgaaatcaaagaccgctggagttctattgttgaagaaatcaaactagctgccgatgccttaaaagcaaatgatgttctgggagctggctggcgggataagattctttctggtaacgacgaggaaatgctaaatagcctcaaagatctttatactacaatctccgatcagaagaaccagtacgaggaacagattgcttccaatgagcgtattgctgatatgatgaaccagtttatggaatcatggcagaatggctcaattacctatgatcaggctatggccggtattaaagacttagcaaatcagatgaaggacggttattcaagtcttgagcatttagatgcaattatgggactcaatggtgcgactgatttaggatcgttgctggacaaaatgcagaatagtgcaaatgcttctgtcaatcaatttgaagactatatgaaggttgtcaaagctaattccgacgccctctccgaatataattcatcttgggaagatatgcagcaaaatataaaagatcagattgctgcactggaaaagctggcagaagaagcagctaaggttgtaaatactattaataaacactcctcttcaagtggtggtgggagcaaaggcccaaatacaaatgacaaaaattttgtaaacagcggccccggagtagcattggcaaacgcccttaatgaaaaagaaattcccaaatatcatgatggcggtgtagtaaaagcaaaagattcaaatggcaagttcatagaattagtatctgcaaaggatttaaacccagatgaagttcccgctattctgaaaaaaggggaatttgttatgactcctgaacagcagaatatgctaaaggagaattttatcaattactctctggtttcctataaaccaccaacagtggacatgtcatcgctggctgtacagaatcgtaatttgccaccaaatgttactgtaactatgggcgatgtaaacctgcccaatgtaaaagatcctgatggctttatgcgattcatcaagagtaattttgatcttgcaatgggacaggaatattcaaaaacgtttagataagggagtgctctatagcactccttttttgaggtgtaaatatgagcaattatgatgaagtggtcaggacaatgaccaaatcaattcttcaagtaattaaaaaaagcatagatacgaagtcgtattcagacaaaaccttcaaatgccaaattacaggcaaagtaaaaggcaaatatcaggtattatattgtggcaatacatatacggtctcctcttctatctcctgtgaaattggtgatttagtaagagtgtgtgctccgtgtaataactggaatgacttatttattgtttgtaaaagcaaataattaaggcaatgtgttctgataacaacggttatcggaaatatgtattcaaaaaatagtagcagttgaatataaaatgctctatatctagctgctacttcttaaaatcaattcgctataatcatatttatgtcctaaacggtctctattcgtccgataaccgttgttatcggtagaaagaggtaaatatgggacaatgtattattatgactggtggctacgctggagatgactctgatgattgcaccgcagtaaaaagtcaggtgttgagtggatataaagcaataacgaaagatagtgacgatgatgcagtaatgggaacaatgccagagcgtggagcgtggactggttcagttggtatgaatggatcagttataattccaggtggtcatcatgatggatcagggaaagtaaatgggccagctattacacagagaggagcctggaatggctccgtaggaatgaattcacaaattgcagtgccagaaggttatcacaatggtagtggcaaggtgtctggcccctccataacatatcaaaatgtagatatatcaggaactgatcgggctcgagcaactaatacaagtgcgtggggtggggttatatgtttaggggtacgtaatggatattatctgaacggtgttaattggatacaagcggatatagcaggcttacaggccggaaacattcgcgaaggtataaacatcggcggattaacaggcacgttgaaagacctatcggtgaaccatgtcccttttgacggcgcgtccttttccggagttttggtgaagggcgccgaactatgtaattggtataacaacactattctaagggaaccggtggagatatctggcgatggcattaggttgagatattccagagtatatcagcagtacaacaagttctgtccgaaagaatcaatcacgttttccgcgttcaaaaaaattcgagtgactgttaaattcactggttcgagcgcaggaaaagggcatgctactgtaactgcatatcgagcaaacacctcgagaagcgacatactgctcaatagcaccactggtattttgaagaatacaactattagcatggactactctggaacgctgtatactggtgaacttgatatatctgcagtgaatgacgagggatttctaacaatccatttcgtgaatgccgaagatcgcaattacacatcgtattttatttgtagaatcgaatttttaatttaagcagcaattataaagggcgctctgaaacatgagcgctcttataataaataatattttgtaaaaaagggagtagtagatatattgagtttggacaataatgagttattgcagtatgctgtttcgcaaggtataattaatttggataatgtgcgagatagtatgaaggaaaaagaaaagcagaagatattggtaaaccataagtacaaaatatttcaagataaagatgggaggtggaaaacgacgttgccagatgaaagtaaaaagtctggtaggaagttagtggcgaaatcatcaaaagaaaatttagaagaagaaataattaaattctatactggaattgaagatgaaaaatatatttctattactattcctactctagcagatttatatcctgaatggttaatatataggagtacactaacaaagtcatcatcgacaataaaaagatataaatcggtatggaatacttggtataaggataaagaaatatctaaaattcatttagatgatttggattatttgtatttaaatcagtgggcgcatttgattgtgaaagaaaataatcttgataaaaaacagtattatcttattacttgtattgttaagcagatgctcaattatgcaatggaaaaaaaatacataattgataatccatttgaacgggtaagaatgaataagaagatgtttttatacaagggaaaaccggacaacaatacacaagtatttctaattgatgaacaaagaatagttgcacaaacagctagatctaaatttgaatgtcggccatggtgtgctacacctttgttagtactgttgaattttcaaatagggcttcggattggcgaattggttgctctgaagtgggaagatatcaatggaaactatattacgatacgacgaatggaaacgacaacttataaagtaaatgagaacggggaggtaattcctgatgggtataaggtcgttccatatgtaaaatctgaggctggttatagagacatatatttgaatagtatagcccaatcattattagcagaaatacgtaagctgaatttaaaatatgattattatgatgatgggtatatatttattgcaagtcgaagaaaaacacggggaacgagcaggactcttacaaaataccttgaatcattgtgtgaaagcgctggtatcatgaataaaagtaatcataaaatcagaaaaacttatatttcatctttattcgattataaaattaatattaatacgataagagaacaggctggccacgaagatgaaaaaacttctttaaataattattgttttgaccaaaaagatgtatctgagcgagaaagagagttggaaagagcagcgaacggaagaatgattatttagaagtgtaaacaagtgtaaacaaaattttaaaactaaaaaagctccgaaacactagcaaatatgcaggtttcaaagctttaaaagagtagcggaagggagatttgaactctcgacaccacgggtatgaaccgtgtgctctagccaactgagctattccgccatataaaattgtgtgataaataatttttatttatccgtgggacctacagggctcgaacctgtgaccctctgcttgtaaggcagatgctctcccagctgagctaagatcccatgcttgtcccggaacttttaatctctgtgttcccgactgctttgctagtataatatgaattgtgttaattgtcaacacttttttggaaatatttttaaaaaaattttattattcattttatacgatttatgatatacttaagattagcaaatggtggagggattccatgtactattttatcataaacccgaatgcgaaatgcgggcgggggaagaacgtatggaagaaactggaaaagattctggagcgtgagaatgcccagtatcaggcgtatataactgagaagccgggtgatgcgaaggtttttgccagaaagctgacagaagggtgcagggaaccgcatgtgatcgttgcagtcggcggagacggcactgtaaacgagattctggatggcctttctttctgcagtcccgttaccctgggttatattcccgccggttcaggcaatgatttagcaagaagcttaaagctgccaagaaagccgggacgctgtctgaagaagattctgtatccgaagtatcataaacagatggattacggagtgcttacttatggaggagatgagatttcctgcagaagattcatcgtcagtgcaggaatcggcatggatgcggcggtttgccataatattctctattccagaacgaagggaattttaaataagcttcatataggaaagctgacctatcttctgatcggggtcaaacagctccttctcgcgaagcccgccaagggttatctgctgctggatggggttcagaaggtggagtttaatcatgcctattttatttccgctcatatccatccatatgaagggggcggttttaaattcgcgccggacgccagctatgacgatggaaaactatctatttgtgtgatgaacaacagaaaaaagagaaaactgataccggtgcttttaaattccatgtttggaagacagtcccataataagggaacccggttttatacatgcggggaagctgtggttcacgtggataagccgatggcggtccatgtggatggagagagctgtttctgtcagaatgacatacagctgaggtgtatcaaaaaggcagtccgcatgattgtataaaccagctataccaccagctatgccaatagtaattcagataacgatacagattttagaatagattttagaatagatttcagaaaggatttaagatatcatatgagaatcggacagggctacgatgtgcacaaattgacggacggaagggatttgattctcggaggagtaaaggttccttatgaaaaagggctgttaggccactctgacgcggacgtgttagttcatgcggtgatggatgccctgctgggcgcagcggcgctgggggatatcggggaacattttccggatacagatccggcttacagaggaatatccagtgtggaactcttaaagcgcgttggagcgcttctggaagagaaggggtatgtgatcgagaacatcgatgcgacaattattgctcagagacccaagcttaaggattacagaccgcagatggtacagaacatcgcagctgcccttggaataccggcagaccgtgtcagcgtaaaggcaaccacagaggaaggtctgggctttacgggaagcggggaaggaatttcagcacaggcaattaccttattgacggcagtgggggattactgttatgatgataaaatcatggacggcggctgtcagggatgcggcggtggctgctgcggaaaataacgaatcaggaggaaattatgaaaatatttaataccttgacaaggcagaaagaagagtttgtgccgttggagccgggaaaggtcaggatgtatgtctgcggaccgacggtatataatttcattcatataggaaatgcgaggcctatgatcgtgtttgatacggtcagacggtattttgaatacaagggctatgaagtgaattttgtttccaattttaccgatgtggacgacaagattatcaagaaggccatagaagagggtgtggatgccgataccatttccaagcgttatattgaagaatgcaagaaggacatggaagggctcaatgtaaagccggctacaaagaatccgctcgctaccgaggaaatctgcgggatgctggatatgatcggaactctgattgagaatggccatgcctatgtggcggctgatggaaccgtttatttccgcacgaagtcatttgacggttacgggaaactgtcccataagaacattgaggatctgcagtcaggattccgggagattaaggtgacgggagaggaagggaaagaggacccgacggattttgttctctggaagccgaaaaaagagggggaaccgtactgggagtccccatggtgcgaggggcgtccgggctggcatatcgagtgctccgtaatgtcgaaaaagtatctgggagaccagatcgatattcatgcaggcggtgaagaccttgtgttcccgcatcacgagaacgagattgcccagagtgaatctgccaacggcaaagaatttgcaaaatactggatgcataatgcattcttaaatatcgataaccggaagatgtctaaatccctggggaatttcttcactgtcagggagatcagtgagaagtatgatttgtctgtgctccgtttcttcatgcttagcgcgcattacagaagtccgctgaatttcagcgcggagctgatggagtcttccaagaacggattagagagaattctgacggcggttgataagcttaaagatctggaaagcagggctgtgggcgattcgtttacagagggcgagagcagggaagccgtggatgaactggttgcgaagtatgaggcggccatggatgatgatttcaacactgccgatggcatttctgccgttttcgagctggttaaactgagcaattccacagcaggggcagacagttcgaaagcgtatgtcgtttatttaaaggagaccatcgaaaagctgtgcgacgtgctgggtatcgttacggagaaaaaggaagagatgctggattctgagatcgaggagatgattgcagcgaggcagcaggcgagaaaggataagaatttcgcgctggccgatgagattcgcggaaagcttctcgagaagggaattgttctggaagacaccagggaaggtgtaaaatggaagagggcataagagatgtttccggattccagacattatgcagagaagcactcagattaaaggagatggatcctgggacgtattctccgctggcgcttgcctatatcggagacgctgtctacgaactgatcgtccgtaccatggtgatcagccatggaagcatccaggtgaacaagatgcataagaagagtgcctcgctggtcaatgcaggtacccaggcggagatgatccggcttatgatggaagaacttaccgaggaggaaaccgcagtctataagcgggggcgtaatgccaagtccgtgacgacggcgaagcatgcgaccgtcgtggattacagaacggcaaccggatttgaggcgctctgcggctacctctatctgatgggacgcctggagcgtctggttacgctgatcagccatggatttgagaaaataggagaactggaatgacggaagaatttacaacggaagaatttataatagaaggaagaaacgccgtgctggaggcgttccgtgcgggaaagaccatcgataagctgtatgtgcaggaggggataaaggacgggcctgtccagtctattatcagagaagcaaaaaaacaggataccatcgtgaatttcgtatcgagagaacgattgaaccagatgtcgcaggaagggcgtcaccagggtgtgatcgcacatgcggcagcttatgaatatgctgaagtagaggacattttaaaggcggccgaggagaagggagaaccaccgtttattttcctgttggacgggattgaggatccccataatctgggtgcgattatccgtacagccaacttggcgggagcccacggcgtgattattccgaaacggcgtgcgtccggtcttacggcggtagtggcaaagacctcggcgggagcccttaattatacccctgtggcgaaggtgacaaatctggctgccacgatcgaagaattaaaagaaaagggattgtggttcgtctgtgcggacatgaatggcgaactgatgtaccggttaaatttaaagggaccgatcggtctggtgatcggcagcgaaggagacggcgttggaagactcgtcagggagaagtgcgacatggttgcatcgatccccatgaagggggatattgattcgctgaacgcttccgtagccgcaggtgtgcttgcgtatgagatcgtcagacagcgtctgggctagtacccgcagagacagcgatgcctgaggctctggtaccgggaagacaggtccggtctgatgtgagatggagatgaggaaagatgaagaagaatagaattgtggttctgaccgcctgtgcggcgctgatggtgtcggtgaacggctgccagagccagaaggcatctgtggcggactcccgggggatcgctgcggagagtacagcagctttgacagaagaatcgctgacagaagagccgcagctgaccggagaagcggagacggccagggaaccggaggcgaccggtgaatcagagactgccggcggacaggagagccaggcgctggtaactgttgaggcggaagcggttccgctgtattcaaagccggcggggagcaatgtaagaacgccgcaggcttccggtacgacgacctacagtaataactcggtgacactggatgcgtccaatctgtctcaggggtatgtgatggtgcagtatacgggcggttcctccaagatcaaggttcaggtaatcaagagcggcggagagacatacacgtatgatttaaacgccagatcctcttatgaggtgttcccgatgtccgaaggcaacggaagttatacggtgcgggtattggagcaggtacagggcaaccagtatgcggtgaagttcagtcaggatctgtcggtaagtctgtcggatcagtttgcaccgtttttatatccgaatcagtatgtgaattttactgcggacagcagtgtggtacagaaaggcgcggaggtggctgcctctgctgcggatgcgctggatgtggtttcgtctgtttataattacgtggtatccaatattacatatgatacggcaaaagccaattccgttcagtccggatatctcccgaactgcgattctgtcctggctcagaagaagggaatctgtttcgattacgccgcggtaatgacggcgatgcttcgctcccagaatatacccacgaaactggtggtgggatataccggcagtctgtatcacgcatggattaatgtttatatcgagggccagggctgggtggacaatatcatctactttgacggccatgactggaaactgatggatccgacattcgcctcttccggcaagggagatccggcgattgaggagtatatcaagaacagctcgaattataaggcaaaatactcgtattaaaatttcataataaaggagaagcgatacatggcaaaggaattgaaaaaacattattccgcccgggagctttcggctttctgtcttcagatatctcttctgcttcgcgcggcaatccctcttgacgagggattgtctgttatggcggaggatgcggcagatgaagaagagaaaaagattctgctgcacatgtctgaagaagtggaactggggagtccgttttcggttgttttgcaggaagtgggaagttatccatcctatgtaatcaagatggcgaagctgggggaggagacagggaccctggatcagatgatggcgtccctttccgaatactatgaaaaagaatccatactgatgaagagcatcaaaaacgcggtgacgtatccgattatcatgatttttatgcttctggttgttttgttcgttctgtttacaaaggtaatgcccatctttgaaagcgtttatgaacagctgggagcccgcttaagtccggtatccatggcggcgacgagactgggcggtatgttcagcggcgtggctcttgcggcgggcgttcttctggctgttgtggccggcatcatctggctgttgggaagaggcggaaaaaagatcggggcagtcgagcacgtggcggatcgttttaagagaaagagccggattgcgctggcagtggcaaaccgcagatttacttctgtactggctctgacgcttcacagcggtctggaactggaaaaaggcatggaactggcggcagaactggtggagaatccggcagtggaagaaaagattaaggcatgcggcgaggaactggagacaggaaccgattattacagcgctatgaagaataccggtctgtttggcggatttcatgttcagatgatcaaggtgggagtcagaagcggccggcttgatcaggtgatggaggagatttccagaagctgtgaagaggaagcggatacggcactggacaacatggtgaaccggcttgaaccgacgatggttgctgttcttgccgtcgctgtgggtctgattctcctctctgtcatgctgccccttgtcggtgtgctttcggccattggataagaggtgagcctatgaaaagatggaaacagacagtgaaggaactgtatggctacgtcctgtccgttgtggtatttgtgtgtgtgctggcgctttttgtcacgggaattctgtttttttcaaagaaggccgatgcgagaggcgcggatacgctgcgggatgccatacggagagcttccgtgcagtgctatgccattgaaggcagatatccgcccagtgtggattatctggaggaaaattacgggattttgattgaccgggataagtatgatgtcttttacagtggatttgcatccaattttatgccggatattacggtcaatcttcacgaacaatagctgggaggtgcgcggatgggccgcagaaatgatcataagggacagctggtaaatacattgtttaccatgcttctgttcctcgtatttgtgctctgtgcgctgtttgcggtgttaatcggaggaaaggtctacgagaatatcaatgccaggacggaatcgacctaccgcggcgatgtggcgctgagctatatagccaacaaggtgaggcagggcgatgcggatggaatggtgggcctgactgagatggaggggatcactgttctccagctaaagcaggagatcaacggttctgaatacgtcacttatatctactacagggatggaaagctttgggaactgttcaccgatacggagagcggtctcggtgtaaatgacggctatgaaattctggagtgtgacgaagtggtaatgtccatggacggaggactgttttcagcctcgaccagtggagatgggggcggccggatctggctgtctttaagaagcggaggatgagacgatgaggaggaaacagcattcgggtatcttcatgatggagatgatcatggtggtcttctttttcattctctgtgccagcatctgtattctggtcttcgtgaaggcggaccggatgagccgggaggccgcggatttaaaccagtcggtactgattgcccagagcgtcgcagaggtatggaagtcggaggggacggaggggcttaaacagcgctttgacgccgacggccctgcagcagaccgtaactccgcaacagatgaagaaggcgcccggaacagatatgtaatggaatttgataaaaacggaagcagtgcaaaaaacactccggctggcagcggagatgaaagaacgagtgagaaagtctatacagcagtgctttcggcggatgaagcggagggctcggcggagataaccgtcagccgtgaggaaaacagcgtctacacgctctctgtaagccgccacgagtgagaacaggggtaacaggaggaaacagatggctaagcaggagagcggatttaaggcgaatattggaagttcttctctgatactgatttttatcgtcatgtgtctcgttacattcgggatgctgtccttaacctctgccaggagtgatttaagccttgcgaacaggaatgcggatgcggttgcggaatattacagggctgatacggaaggcgaggcattttaccgcatggtggcaggggaagtaaaggcggcatgtgccggcgccgcaggacaggaggagcgtctcgcgctgcttaagacatctctgggagagtacctcagagacggagtcgcggtgacggaagtatccatggcacgtgcacaggcgcttcacatcgagctggaaccggatttggacggtgacggttctgtgcgtgtagcgaaatggaatgtgattcagacagaagattatgaaatagacgattccatgccggtatggggcggaacggttaattccgaagagaagtaggctgtttccgggttccggcgggaaagaaagacagggagagttgcaggtatgaaggtaattgatttgttgagttcggctgtggaacagaatgcatcggatatctttctggtaccaggcatgccgttctcttataagctgggcagcaggattgtctgccagaacgaggaaaaactgtttcctgcacagatggaaacactgattacagagctttatgagctggcagggaaccgcagcatggagaaggtgagagagcatggggatgatgatttctccttcgcccttccgggggtatcgagattccgttccagtgtgtttcgtcagaggggatcgctggctgccgtaatccgggtggttacgttcgatctgccggattatgagacgctgcatattccgcagaatatcatcgatattgctcagatgaccaaggggttcgttctggttacaggaccggctggaagcggcaagagtacgacgctggcctgtatcattgataagatcaatcatacgagaaacgcacacgtcattactctggaggacccgatcgaatacctgcaccgccataagaagagtgtggtaacgcagagagagatcgtgacggatacggacagctacgtgtcagggctccgggcggcacttcgccaggcgccggatgtcattctggtcggtgagatgcgtgattatgagacgatccagatcgccatgacagcggcggagacgggccatctcgtcatctctactcttcacacggttggggcggccaataccatagaccgtatcatcgacaattttccgcccaatcagcagcagcagatccggatgcagatctctatggttatgcaggcggtggtgtcacagcagctgatccctacggtggatggcggtgtttatccggcttttgagattatgttctttaataatgcgattcgaaatatgatccgcgagtccaagacgcatcagatcgacagtgtgatcgccacaggacaggcagaaggtatgatctccatggataccagccttttaaacctgtataagaagggcatgattacgaaagagagcgctgtcatctacagcagcaacagcgaactgatggcgaaaaaaattgagcgccagggttagggattaagcatatttttcccataatcagttatactatccgtaagacaagactggagggtgaactgattatgagaacagataaaagaaaagtagcgctcatcggtaccggtatggtgggcatgagctatgcatattccatgttgaatcagaatatctgtgatgagctggttctgattgatattaacaaaaagagggcagaaggcgaggcgatggatttaaaccatgggcttgccttttctgcgtccaatatgaagatttacgcgggggagtataaggacacgtcagacgcggatattgccgtgatctgtgccggtgtggcacagaagccgggagaaagcaggctcaacctgttaaaacgaaatgcagcggtgtttaaatcgattgtggaccctgttacggagtcgggctttaacgggatattcctggtagcgactaatccggtggatatcatgacgcggatcacgtatgcgctttccggatttaatccgcggagagtgctgggaagcgggaccgctttggatactgccaggctgcgctatctcctgggagaatctctttctgtcgatccgcggaacgttcacgcctatgtgatgggggaacacggggacagcgagtttgtaccatggagccaggcgatgatcgccacgaaacccatcctttcattatgtgaggaacagggagagggcggtatggaagtgatctgcggggatgagttaaagcggattgaggaagacgtgcgtggagcggcataccagatcatcgaggcaaagagtgccacatactacggtatcggtatggcgctttccagaatcacgagggcgattctgggagatgaaaacagtgttctgaccgtatccgccatgctgcgcggtgagtacgggcagaatgacgtatatgccggtgttccttgcattatcaataaaaacggcattttccgcgtgctgccgctggacttaagcgaggaggaaaaacgacgcctcggtgagtcctgtgatacactcagggccagtttcgacgaattggaacagtaaaggcagccgttcggttcgtgaaggtgacacggaaaaacgaaaatacagaaaaaggaccagccgtccggttgagcggctagtcctttttcttttctcccgtggccttagattctttgcgttcttcagcgttttcttcgtcttcatcttttacatattccagaattgcgctgatatcacagtccagatatttgcagactctcgccatcagggcaaggtcgacgcgggagaccttgttgttgcagtaattattcagctgagtccgctgtatttcacagtggtaacagactttgttcttgctttcgcccttttcacagattaagtcggccagcttaatattaatatgccccatataacgcctccttccgtatagtgatattatattcaaatatatgtgcgaaaataagatgtatttatatagatatattttaacagatgtattaaaatacaggtacagcgctattcgaaaaggagaggaagtaccgtatgaagagattgtcctgttttgcagcagcggttattgtgatggtgacactatacagaatgataccacattatgagatattagcccagtacagtttcagttcgcccggcagcagggagacgacaattcttgccgtcagccacaccgttgggcctgcgctctacgcatcgggagaaactattttaagactgcacagaaaactgaattacgatgttccttccagccgggttattcttatgatttatggaaagaaaagcgatgtggagaaggggaaatgcagtgcgattatgatttatgagggagaggatggcagcagggaagaagatgcaggaattgtattcttaaaatgaccggagacatgcagggcggttggcgcagtgaggggattccacttacttatctggtatacaaaataaaaaaacccttgaatattcaagggtttcaaccagctgatgacgggactcggacccgtgacctcctcactaccaatgaggtgcgctaccacctgtgccacatcagcgtcttatgttttagctcgtcaagcgaacctcatatatagtagcatgagaaattatatttgtcaacagaaaaaatataaaaatttatatcttttttatctgaatcgagaatctttgacggaagcttttttccgtggtatactgttcccacgtggcgacaggaggtatttcatgaagaagaaacgcagaaaaagaaaaagtgcatgggctgtttttttcaaacccattaaagtaatattctcgatttttttaattctgatgattctcgggctgggagccggcggcatcgtatatttgaagttcggggatgagatttcggcctgtaaggaacgggcggatcagattgtggcacagtcgaagagagaagatttttcacagccgtcggataccagaatctacgattcctcgggacaggtgatcggtattatcaatacgggacattatgagtacgtgccaattacggagatcagcgagaatctgcagaacgcatatattgcccaggaggacaagcgcttttatcagcatcacggtgtagatattatcggccttgcgagggcgggagtggctctggttaagaataagggggagattacccagggcggcagtaccatcacgcagcaggtgatcaaaaatacgtatctgacacaggaaaaatcatttacaagaaagattacggagatctttgcggcaccgcagatggaagaaaagtattccaaggccgatatcctggaattttactgtaataccaatttctatgcaaaccgctgttacggagtggccaaggccagcctcttttattttgacaaagaggctaaggatctgactgtctgggaggcggctacccttgcaggaatcagcaataatccgtcgcgctataatccggtggcccatccggaagcggcgctggaaaaaagaaataaaattatcgacaacatgcagaaaaatggcatgcttactgaggaagagtgtgagacagccaaggcgcagccgcttacggtggctaaggtgacagaggaaggaacgaaggagacataccagtccagctatgcagtccactgtgcggcccaggaactgatgaagaacgacggtttcgagtttgaatacacctttgccgatgaggctgcctataatgactataaggagcgctatcaggaagcgtatcaggagaagagcgatctgatccgcaacggtggttttgagattcataccagcctcgacagcacgcttcagacacagcttcaggccgggatagatgaaacgctggcgaagtttaccgacgtttcggagaacgggaaatacgcgcttcagggggctgctgtctgtatcgacaaccggacgggttatgttgtggccatttccggaggacgaggcacggacgatgaatataacagaggctttttgagcagacgtcagcccggatcgacgatcaaaccgctgatcgactatgctcctgcctttgaaaccggttattactatccgtcgagaatggttaatgaccatttgttcgataaggggccgaagaacagcggcaataaatattacggtgaggtctctgtgagggaggcgctgaaccgaagcttaaacacggtcgcctggcaggtgctggcagatatcggcgtggactatggaatgagctatctcgacaaaatgcattttgtaggactcagctatctggataactggaataccagcatgagcatcggcggatttaccgagggcgcccgcgttgtggacatggcgaggggctactctgttctggctaatggaggaatgtacagcaacaatacgtgtatcaccggcattgacagtcagtatgagggcgacctctatcaggagaatcagccggaagaacgtatttttacggaagacacggcatatatggtaaccgatgtcctaaaaggaaccttaaatcagccatacggtaccggttatggactgggactgccgataccggcagcaggtaagacgggaacgaccaacagcagtaaggatacctggttctgcggctatacaaagtattacaccacagctgtctgggttggctacgataccccgaaagccatgccgggcgtgtacggaaagacgtatgccggaaaaatctggtatgattttatgaaacagtgcaacgaaggccttccggctgaggactgggtaatgccgtcaacagtcgcctactataatgtggactccagaggtgagaagaccagtcaggagaccgggaagcaggatctgttttcttctgtggcagaacagaatgcgaggtccaactcgaagaagtgggatgaggaacagaagatgaaggaggaaaatgccagagctgctgctgagcaggcttcgagagacgccgcggcacaggggcaggagcaggcggctgcagggcttaccgctctgatcggtgaattaaacgctcttgcgtaccaggatgatactacgcaggaaaagatcagccagggccggacgatgctggagatgctggacggtacagaacagtacgaggcgttaaagcagcagtttgatgaggcggcagccagggcgggatctcttccgtatgaggaacagaccgttccgccatcccaggagatcgggccgggaattacccatgaggcgagacctggcgaggccccgtcagcttcacaggatatcacctccggtcaggctccgggcgtacagccgggcgcggctccgggaggtatcgaagcagtgggaccgggcggcctgtaaagaaccgggagttacgaaaaaaggttatgaaaaacagaacattttagggttgctttttattgggatagctgttatgctagatgaggatttatgaaaatcataaaaataaacgatgaaaggaagtgaaccagagtggaaggtcgaagtcagaagatggaagcagacaattatcataagcgggtggtagtgtgggcagagtcgatgacttcggaactgctctgtcttcactgccgttaaagaatcgtcttttgcgcttatgatagccatttcctgagggtctgcgcctcagggatggctatttttgcgtgctgcttccacggtaaaccacacttaaaaaatatggttcaaatggaaggagaaagaaaatgcaggagaattttagcatggaagaactgatggatctgctgtttacccgtcagttccgtaaattgaaagatattttgacagagatgaacgaggtggatattgccacttttattgaagaactggattcagagaagaccgtggtggtcttccggatgctgccaaaggaactggcgtcggacgtgtttgcctgcctggaggtagataagcaggagcacattatcaacagcatcacggattatgagctgggtaccattgtagatgatttgttcgtggatgatgcggttgatatgctggaggaactcccggccagtgtggtaaagcgtgttctgaaaaacgcgagacccgatacgagaaaattgatcaaccagtttttaaattacccggataacagcgccggcagtattatgacggcagagtatgtcgggcttaagcagtccatgaccgtggagcaggcatttgcctatatccggaaaaacggtgtggataaagagaccatttacacctgctatgtcatggatgaaaagaggagactggaaggtgtagttacggttaaggacttactgatgaacccctacgaggaagtaatcggaaatatcatggatacccatgttatcaaggcatttaccaccgaagatcaggaagaagtggcggacagcttccagaaatacgaccttttaagccttccggtagtagatcatgaagaacgcctcgtcggtattgtaacggtggatgacgtggtcgatgtcatggaacaggaggctaccgaggacttcgaaaaaatggctgccatgcttcccagcgagaaaccgtatttaaagacaggcgtctttcagctggccaaaaacagaattgcctggcttctgattctgatggtcagcagcatgataaccggcggaatcctggcaaaatacgaggctgcctttgccgtgatcccgcttctggtaaccttcattcccatgctgaccgacaccggtggcaacgcgggaagccagagcagcaccatgattatccgtggtatggcggtaggtgagattgaaccgggcgacttatttaaagtgctctggaaagaactgcgggtaggcgttatcgttggcatgattctgggctttgtcaattacgttcgtctcgtaattctttatccgggcagagaaatgctgtgtctgaccgttgtgctgagcctgatggccaccgttattattgccaagaccattggctgcatgctcccgatcgcggctaaagtgttccatatggatccggccattatggcggcgccgctgattacgacgatcgtcgatgcggtgagtttgattatttatttccagctggcgtgtacgctgctgggcttatagaaaattatgaactgactgtttaaacataataaccgttttcaaagtgaatctcgttttttatctcttgtttttacttctgaagcctgtacccagccccaatgatggaggagaggcggagggagggggagaaggaacctgccgtcccttctccccctccctccgcctctcctccgtcactggggcgtactccctttcccctaatttccatgtattacctttacatctcccccattatatgctacaatttccttatcgtactgttttcaaaaatataacgctctaaaaaggaggaaaccaatgactacaggagcagtgatccttgctgccggccataaaagctcgacgaccagcttccagcccatgcttccggtcggagatacgactgcggtgaggcggattatcataacgcttcagagagccggtgtggaaccggtggtggtgattacgggagacagaggagaagagctggagaagcatatttccaagatgcgcgtggtatgcttaagaaatacggagtatgccgggacgcagctgttcgacagtatctgtatgggattaaactatattgaagatctgtgtgacagagtgctggttatgccgacaaaggccccgctgctgctgtcggagaccatcgaaaagattatggaaagcagggcccctctgtgctgtcccgtatacgacggcagaagaggccatccggtgatgattgcgaaggactggattccgaagattctgaactatcagggggagtacggactccgaagctttctcagggagccggaggcggatgcggtgctggaggagattcccgtggatgacagagggattattcaggccgtggagacggatgaggactgtgccatggcgatgaacggaaggcatggaaagctgccgcttcacagccgcatgtcgctctatcttgagtgcgacgaagtcttttttggaccggggatcgcacagtttctgtcgctgatcgaccataccgggtccatgcagaccgcctgtaaacagatgcatatgtcctacagtaagggatggaagattatgaagactgcggaacgggagcttggctatccgctattaatcacccagtccggcggcgcagagggaggctattcccagctgaccccgaagacgaaggactttttaaaccgttttttgcagatggagcaggagatgaacagtcaagccgcccgtctgtttgaaaaatattttggagatgagaggtaatggggatgaaacagttatttgaagaaatgaaacagcttctggagcagggggacgacctggttctggtgacggtgatcgccggttccggttccacaccgagaggcgcaggagccaggatgattgtcagaaaagacggaacaaccatgggaaccattggcggaggcgcggtggaatatgaggcaggccgcatggcgctcgatgtgctgaagagcaaaaactccttcagtaagggatttaagctggtaaagggccaggtggcagatctgggtatgatctgcggcggagacgtagtggtctatttccagtatgtaaatccggataaccgggaattccttgccatctgtgaggaaggaatccaggcgtgcgaaagggatgaggacagctggattattacggatattacggatgagacagcatgggccgtaggaatctattcagaaagccatggctttgccgggattaccgtggagggcgatatagaacctctgacacagacaaaggcagtgcagaccaccgtaaacggcagacggtattacagcgagcccctgatgagagccggaacggtatacgtgttcggcggcggccatgtggcgcaggagctggttccggtgattgcccatgtgggattcaaatgcgtcgtttatgatgaccgccctgaatttgcgtgcagcagcctgttcccggatgcggtggataccattgtcggtgattttaccagtatttttgataaggtaacgattcgtgaacaggattacgttgtgattatgacgagaggccatcagtgcgattatgacgttcagaaacaggttctcagaacgccggctcactatatcggcgtgatggggagccgccagaaactgatgacgcttgccggaaagctgaaagcggaaggcttcaccgatcaggatatcgaacggttttacagcccgatcggactggcaattctggcggagactccagcggagatcgccatcagtgtggccggcgaactgatcatggtcagagcaaggagagagggccggacaaaatgacagaacgccatctctttttgaagggacggtccgggacagggaagacgacgtggcttttgtcctgcctgaagccttactggaaggaagcgggaggttttttgacccagcgtcttatggacggtaccggtgagactgtgggattctgcctcctgccagtggagaatatgacggaaccgcctcccgtgacgagactttatgagcctggaatagagggcgtttttattgagaaaacactggaaggatggagaaagtatccggaggtgtttgagacaatgggggcggagattctcgatcgcctgctggaccggccggagcggtaccgtttttgttatatcgatgaggccggaggagtagaactgaaggtaaagccgtttatggagcggctggagcggctgcttgacggtccgctcttctgcatcggtgttttgaaacattcagataatctggcagccatgggtacgagagtatcgctttccgccaatgcggctccggacaggaaccggctggaatcgaagatggaacagcactttcattgccggattctgtcttttgcaggggctgaagatgagaagatggaaatcaggcggatgatacaacagcggcttgccggaaccgcagagaaggagtgtgaggggtaatggtggaaaaacgccgggtacgtatgcggcttactgcgatgactgtgttgtttgtcatctgttttttcggatcatttatgcttggaagatatccgattgagccgtggacgctgattcgcgtgctggcctccagagtcattccggtcacaccggactggccctcacaggtagagacggttctttttaatgtgcgccttccgcgggtgctgatggctgcgctgattggagccggtctgtcagctgccggagcggcctatcagggaatctttaaaaatcccatggtctctccggatgtgctgggagcgtcctccggagccggttttggtgccgccctgggtctgtttctctcattttcctatcagggggtatcctttttggcatttatttcaggactgtctgccgtggctgtcgtctgcctgatcagcggccgtgtgaaatacaaccagactctgggactggtactggctggaatgatggtaagctccctgtttacggctgcggtgtccttcttaaaactggtggcggatcccaataatacgcttccggtgatcacctactggctcatggggagtctggcctcgatccggccgaaggatctggcgtttgcggctccctggatcatcggaggtatcattccgatctgtctgatgcgctggaaaatcaatgtactgacgcttggagaggaagaggcgcgctgtatcggcgtcaataccggtgccgtccgtctggccgtagtgctctgtgcaacactgattacatcggcggccgtatcggtcagcggactgatcggatgggtggggctggtgatcccccattttgcccgcatgctggtgggaagcgattaccggaagatgcttccggcttccctgcttttgggcgcaagttttttggtggtggtcgataactttgcccgacttctggccaccagcgaaatccccattggtatccttaccgcgtttgtgggagcgccgtttttcctctggctgatcctgagggaaggaaataaactttgagaggtgatcgaatatggggctggttgtagaaaatctgaccttcagttaccggtgttttcccgtccttaagggcgtggatttttctgtggaagcaggaaatctcgtctgcatgctcggaaagaatggagccggaaagagtacgctgttccgctgtatactgggcctcttaaaaggataccaggggaaaatcacagtcgatggcgtggacttaagaacactgaaagagaaggacatggccagaaagatcgcctatattcctcaaaatcatgaccaggcgtttgctttttcggttctggacatggtaatgatgggaaccacatcgtcgctgcagggctttcagaatccgggcaaggagcagcgggaggcggcttttgacgcacttaagaccatgaggatcgaagcgatggcggaacgctcttacgcacatctgagcggaggagaacagcagctggtcctgattgcgagggcgattgcgcagcaggcgggaatcctcatcatggacgagccctgtgcaaatctcgattacggcaatcaggccagagtgatggaggagttaaaacggctttccagggagggataccttattgtacagtctactcacagcccggatcaggcgtttctctacgccgaccaggcggcggttctttcggacggggtgatcagggctttcggaaagccggaggaggtgctgacagaagcactgctggaggccatgtatggcataccggttcggttatttgatgcgggagacacgggcagaaagctgtgtatgcccgaacgggtgaagggggaataaatgatgtgggaactgtatgaaaggctgattgagccgatcccggacgatgttccggtggacgaaattctcgtgggaaccagctgtacgatggtgagagccggaggcgcagcgggggccgccgccaaccagaggttagagagccggccccgcatactgggagaaggagaatgggaacaggagctgacatggagacaggcggcgtctctgattaattcctggaattttttggaggcgggtatcggtgcggcggccatcaatgcctactataacaggaaagacgtgctgatgaacggaattgctgcatatgagggcgtgaagatcctggagagctgcgacacgtttgccgcaccgggggatgggttcgccggaaaaaaggtggcgaccatcggccatttccattatgcggaacgctatttgaaaacggcgggggaactcttcgttctggagcgggaaccccgggagggggattatccggatactgcctgcgaatatattttgccggatatggattatatctacatcacgggttttacgctggtgaataagacacttccaagacttctggagcttgggaaaaatgcccgggtggttctggtggggccgagcgtcccgatggcgccggtgctgtttgaatttggtgtgagggagctggccggaactctgattacggatacggagaagacggaaaggcttgttcgattcggcagccaccgggcagttgtccgttcagggatacctgtaagagccgggtatgaagagtgacggaaggcagaggcggccggcagtggccgcgggttattgagagaataaagaaaattcagggaggtaataacatgagaaaaaggaaacaaatatggctggggctgtctcttgccgcagccatgatgatgggattaaacggctgtgcaaaaggcactggaaacgccgctggaaacgccggagatacgcagcaggccacggtggcagagaccactgtttccgacacgtcagaggcggcgctgcaggagaaaacagacagttccgcagccggagacaacggtgtgcgggaggaagggacgagaattgttacggactcagccggaagagaggtggagatcccttcggagatcacgaagatcgcgccctccggtccactggcacagattgttctttacacggtgagcccggataagctggccggtctggccgctgatttctccgatgaggcgaagcagtatattgacgaaaagtactggggccttccgaaattcgggcagttctacggaaaaaatgcaagtcttaatatggaagccctgattgcggaagcaccggatgtcatcattgatatcggagaggcgaaaaagacggtaaaagaggatatggacgctctgcaggaacagctgaatataccggttatctttgtggaagcgacacttcccactatggcggatgcctacgaaatgctgggagatattaccggtgagaaggagcaggccgggaagctggcggattactgcagggcagaaatcgcaaaggcggataagaatgccgcggcgattgatgacagcgacaaaaagagcgtgtatttcggcctgggcgacgacggcctccacaccaacgccaaaggttccatccatgccgatgtcatcgaacggatcggcgcggtcaatgcagccgatgtggaagcggtgtccagcggaggcggaagcgaagtgtcctttgaacaggtgctgctctggaatccggatctgatcattgtggattcccagaaactttacgacacgcttacatcagattccatgtggcaggagctggatgccgtaaagaatggcaaaattttcaagattccgactgcgccctacagctatatgagcagcccgccctctgtaaaccgtatgattggaatcgaatggctgggaaatcttgtctacccggatctctattcatcgaatatccgggaagaggtgaagaatttctatcagcttttctatcatatcgatgtaactgacgaacaactggataccatactgaaggatgctgtcagcaattagtcagccgtttggcagaaaaagtctgaaaaatacgcggagccggggaagggcttcgcgtattttggtgaattctgcagactctttaagcaacagccggttttgcggctggcgcatacgccggcttatttgagccagtccagctgtccgctttgtatcgcatcaagattctgtgcaatccgttcctccggccagtcccaccattttaatgatgacagagcggcaatggtttcttctgaataccgtcttttgattggcctggcagggatcccgcctgcaattgtatagggcgggatatcctttgtcacaaccgcgcgggctccgatgactgcgccgtcgccgatcgtaactcctgccataaggacggcctcgtagccgatccagacatcgttgccgatgatgatatctcccttgttatcccacgaagccgtcacattctgcttatccagtccccattcttcaaagaaaagagggaacgggtaggaagacagcgaggataatgtatgattcgcgctgttaaagagaaattttgctccacaggcgatcgagcagaatttgcctatgataagacgatcctggttgactggataatggtataaaacgttatttttttcgaaatccgccgggtcgttgacaaaatcgttataaatggtgtaatcgcccacctgaatactggggtcggtaatcgtattttttaagtaaactgtctgggtatctccggttctgggatataatttttttaaatccggcattttacaaatcctccttattgtttaatccataatagtattctaataattcgcgggaataatccacgactctgccgcctggcagcagtaacacccggttaatgccaatctgttcaacaaaccagggattgtggctgacaaccataatcgttccttcaaagagttgaaagtttctgccaatgatactctgcgtttcaggatccaggtgattggtaggctcatccaggaccagaaagttggccttttgcagtaaaaccctgcacaggcatacacgggctttttcaccgggagagagaacctcggcttttttacagatatcgtcctcgtaaaacagaaaattacttagtaccgaacgcagctgtttgatggtatagccatcagtctgaacattttctaacactgttttttgcagatcaagctgttccagttcctgcgcatagtaagcaacatccgttttagaatgaaaacggatctttcctgcatccggaagaaggattcccatgatcagcttaagcagcgtggattttccgactccgttttcaccgacgactaaaaagcgttcttttccatttacgtgaaacgataagtctttgtagagccatggctggtccggataatggaaggacaggttacaaacttctaacgggagatctgcgccttcccgtctgggacggatatccattttaacccgtttgcagattctgtcacaaggatggagccagcttctttttttctccagccttaacgcccgttcctgccccatgcgtttcagcgcatgattggtcctgctggcctggttagcccgctgtacaaatgcttccagttcctttatctctttttcctcctggatgagaatccgttgacgcagacgctgctcctctgtatacttctttttataagtatcgtaattgccgtcgtagacagaaattttgtgcgcagctttattgatgaacaggattttgtgaataatctgattgaggaaggcggtatcgtggctgataatcagcaccattcctttgtaattttttaaaaactcagtcacaaactcttttgcagccgcatctaaatggtttgtcggttcgtccagcagcagaatgtcagcttttgagtatagaacgcgggcgaaggctatttttgatttctgaccgccggacagccggttaatcggcatatccagcaaatcaatgtcaatctgcatgcgttcaatgatatccagcaaaatgctgtctgccttataacagtcgaaaaattctaaatgggtctggagtttatccatctgcttcagcagagaggcatgctccgtgacagtcgcatgttccaacctctgatagatccggctgagatctgcttccagtctgcgtatcggtcgtccctcctgcagataatcgagaactgtacaggtttcgtcgtgaatcacaatctcctgcggcagacaggcgattcgtgaattgccggtggatatggttccgctgtctaattccagttcatgcatcagaacatggaacagcgtcgttttcccggcgccgttgacaccaacgatacctgctttgtcgtgatcgtttattaaaaattccgcgtcctcgtaaatgatttccgacccgaaacttaaattcattttactgcctttcatagtcatatgaaacctccctgttttgctgaatcagacggttgttttcccatcgcctgcctcgaaagaagaggaatccggcgatggcaggaattatgggtgaaagagcctgcccgatatagatgccggggaaaccgacgccgaaagtaaaggccaaaagccagcttacgggaagccggacaatgaccgcatctaaaagtgcattgaacatggcaatgtttgcagaaccgacgccaatggcaaaggaatcaaatgtatacataaccgcgtaaacgagactgtttgccccgcagcatatccttaaatacagaattccgtctgatatgacttctgcattcaccggattaaatatcatcatgatcggttttgcaaaaagctgcactagcagtacggtgagaagcgtgatgatgatatttaagtaaagtcctgctttcgttgtttttcttactctgtcgatatcgttcgcgccaaaattttgtcctgccatggctgttaccgcctgtccgatggcccagcagggcataccggcgaacgtgttaatctttaatcccacgccggacgcggcggcaaccgggacaccgaaacggttgagcatccccgtaatgagaagataggaaatattaacgacagccatttgggccgccgcaggcagtcccaccttcaaaatagctgccatcttatccggtttcacggcaaaatgccggaatttaaagtcaaacacagagttccgcctctttaagtggataacagaaatcataaacgaaatcccctgtgatgcgatggtcgcataggcggccccttctgttcccatggcgaatggtcccaccagtatgatatccagtacgatattgactgcggctgcaattgcgacgaaggcgaggggactctttgaatctcccagcccttttaaaatcgaacagaccgcgttatagccaaacacaaatacggtgccgcagcagatgattttcatataggcgcaggtatcctccatcgcttccggaggaacattcagcatgcgaaagagcggcttatacgcggaaaggcctatggcagtaacaaggattgcggcgagaaaagcaatggaaaataaggtgccgactgtttcacgctgccctttttcatcgcctgcccctttgtattgggcggctgctacggtgcctcccatcgtaaggccgatacagactgagttgataataaagcctgccatagaggcgttgcttatagcggcaagcccggtatttcctacaattctgccaacgaccagcatatcaacgatgctgtaaaaggactgcagcaagttggcaaacagcaggggcagtgcaaaaacaatcaatttcccgggcacactgcctgttgttaaattctgttcttcgttcatattcaatctccttatcccgcatcacaggagcatctgcctgtgatacaaaaaaagcagagggcagcacaaatatagtgcgccctctgctctgtggtaaagatacttaattcacggcgatggagcgcacgacggacgcacgcttcaccgctgtcaacaaaaggcggcagacaaaacactgtctgccgcccaaaaaacaaataaatgtctattggaaaacacgaaaacgaaatcccaaaactactgctttggaatcaaatagccgctgactattgttttcgtattttcaggctccgcacaatgttttgtaatatcaaattgtccggagctgtaatcaatgcaaagctttccagataacattgcactcaccctttcttcctgtattataaaacattatagagagtccgggggaggctgtcaagcgtaagctgtacttttaggaaaaaaccgctgtatagcccgtaaaacgcggcaatacagcggttttttcctttatcagctgctaaagatggggtggatgcttaagccttgtttacaaaagactcacagtctgtacattccttctgggtcggattagcctcgtgggtacctaccttgatggcctcaagagtacagtagttttcgctctctgcatggtaagcgcagttgttgatggtacaatgaatacattcgttctttccgttaactaacatggtttcatacctccttaattgtttaatcagtaatattatctgcagaattgaagaaaatatacggaagggatgccggaacgtgttggggacttgttagattgtatgtttgggtgtatactgttttcattgaaaaaaatcgatggaaaggtttttggggaggttgttggggtgggacagaaacagaagacaaaacaggtaatcatgacggaaggcgtaatctggaagcagcttttggcattttccatgcctcttttggtaggcaatctgtttcagcagctgtataataccgtggattccattgtggtcggaaattttattggcagtgaagcgctggcggcggtaggttccagcaactctctgatcaatctgatcatcggaatgtttatgggcattgccaccggggcgggagtgattatatcccagtattacggggcgaaggatgagcagaagcttcactgggcggtgcacacctgtatggcgctgagtctgattggaggagcgcttttgatcgtgctgggcgtgcttctgtcgcctctgattctccgctggatggggacacccgaggaggttatgccgaattccgtggcgtacctgcgcatctttttctgcggttccctgtttaacctggtatataacatgggggccggagtgctgagagcggtaggagattcgaggcgtcctctctattatctctgtgtttcctctgtggtaaacatcattctggacatggtttttgtcgttgttttccgcatgggcactgccggagtcggctatgccaccgtaattgcccaggcggtttcttccgtgcttacggtgcgggcgctgatgaagacggaggacagctaccggctcgtcccatccaggatcagaatcgaccggcgcatgatgaagcgaattttaaagctgggcatcccgagcgggattcagcagagcatcatctccctgtccaatgtcatcgtacaggcgaatatcaacggctacggtgcggccgccatggcgggctacggcgcctacagcaaggtggatggcttcgccatgctcccgcttcagagcttctgtatggcttcgaccacctttacaggacagaatatcggggcgaaaaaggcaagacgtgtcaaggatgggatgtttcaggggattgccatcagcctgatttatacggcctttatttctgctgtcctttatttgaatgcggacaagattctccgcatcttctcaccggatgatacggttatcgccttcgggcacaccaccatggccatcctgcttccgttttactggtccatcgcgatccaccagatcctgatgggaagtatccgcggaagcggaagaaccatggttaccatgttgatcggcgttggaaacatgtgtatcctgcgcatgatatatattaatttactggttccatttttcccgagttttgaagccgttatgtggtgctatccaattacctggatgacaacgatgctgatggactgcgtttacagcgcaaaggcaaaatggattccgaaaggagaatagacgatatgaaacacggatttatccgggtggcggcagcaactcccgatgtaaaagtggctgatccccagtttaacaggacagaaatctgcgctctgatccgggcgggaatagagagaaaagcgaagctcatggtatttccggagctgtcgcttactgcgtacacctgcggtgatttattcgggcaggatgccctgctgtacggggcgaggagagaactgaaagagattttaaaggagacggaaggttccgatcttctggcgtttatcggaatgccgtgggagaggagcggaaagctttacaacacggccgtggcggttcaaaacgggagaatcctgggcattgttcccaagtcaaacattcccaactactctgaattttacgagcgccgttatttcgaaccgggcaatgagatccctgtgatggtcagctgggaaggacagaatttccctatggggacaaatattctgtttgcctgcgaggagatgcctgggtttgttgtggccgcggaaatctgcgaggatgcctgggtaccatgtccgccgtcgatccgccatacggcggccggtgcgaccgtgatcgtcaactgttctgccagtgatgagaccacgggaaaggatatctaccgcaggagcctgatcaccggccattccgccagccttgtctgcgggtatgtgtacgccaatgcgggagacggcgagtctacccaggacctggtgttcggagggcagaatctgattgcagaaaatggaacgtgtctggcggagtcgaaacggtttgccaacgaaacgatttttgcggatatggatatggagcgtttaaataatgagagaagacgcctttccacatatccggtcctgaataccggctcatatgttacggttggatttcatataacagaagaggagtatgatctggaacgtcccatcgatcccatgccgttcgttccgacggatgaaggtcagagaaacaggcgctgtgaggagattctgtccattcaggccatggggctgaagaaacgtcttgcccataccggctgcagccacgccgttatcggcatttccggagggctggattccacgctggctctgctggtgacggtgcgggcgtttgatatgctgaacataccgagacatcagattcatgctgtgaccatgccgtgctttggaaccacggaccggacgtatcagaatgcctgtctgatgacgaagaaggtgggggcggagctgactgagatcgatatcagggaagccgttacggttcattttcgtgacatcggccatgatatcagccttcacgatgtaacctatgaaaattcccaggccagagagcggacgcaggtacttatggatctggcaaaccggtggggcggcatggtggtgggtactggcgatatgtcagagctggcgcttggatgggccacctacaacggagaccacatgtccatgtacggggtcaatgcgtcggttccgaagacgctggttcgccatctggtccgctattacgccgacacgtgcggggaggaagaactgaaagcagtgcttttagacgtgctggataccccggtgagtccggagcttcttccgccgaaggagggcgagatcgcccagaagacggaagatctggtaggcccctatgagcttcacgatttctttctgtatcaggtcctgcggtacggttaccggccggccaaggttttccgtctggcaaaagcggcttttgacggccagtatgacggagagactgttttaaagtggctgaaggtattttaccggagatttttcagtcagcagtttaagcgctcctgtctgccggatggcccgaaggtaggctccgtcgcagtatcaccgaggggtgacttacgcatgccgagcgatgccagcagccgtctgtggctggaagaactggagggattgtcatgattacgagcagtgccaacggaaaagtgaagcaggtgatgaatctggcgaagaaggcgaaggccaggaaagagaccggtctgtttgtggcggaaggtctccgcatgttcaaagagattcccagggacaggatcgatagtctgttcgtgtcagaaagcttcttaaagaatccggagggaaggaaactgatcggcccgcttgcctttgaggcggtggcggatgacgtgtttaagacaatgtctgacaccaccacgccgcagggtgtgctggcgctggtgaagcagtatgcgtatacgatcgacgatattctggaccgtccggggccggcgcttctcatgattctggatacgattcaggatcccggaaacctgggaaccatcctgcgtgccggagaaggcgcaggcattacgggagtgattatgaacgacaccaccgcggatatctataaccccaaagtaatccgctccaccatggggtccgtctgccgtgtgccctttgtttataccgctgctttaccgcagactctcgcgaacataaaaaaacgcggtgtccgcctatacgcggctcatttagaaggcaggaataattatgagaaagaagattatactgttgatacagggtttttaattggcaatgaggccaatggcttaagcagcgaaacagcgtctatggcagacgcgtatgtgaagattcccatgatgggaaaggtagaatccttaaacgcggcggtagcggcttccgtgctgatgtttgaggcggcgaggcagcgaagaaattagaaaatgcagcccgtcaggttaccgctcacgccctgtccggtgccccgccgcccactctggctcctgcgcttcctccggtccttccagttccggtttcgggcataagtacttctaaacgtgcagaatttttctaaaaaccaggggaaatccccaaactcgctgcgctcagacaggtggggattccccctgaacgaaaaattatgcgcgttaagaagtgctaatgccctgcaaagtcacaggaaggaccggaggaagcgcaggagccagagcgggcggcggggcaccggacagggcgtgaacggtaaccccgtcagaaaattgtaaggcatttttagacggtaattgttgagaaatgtctgaaaatatagtatgattagtgcaaatgaaagatatgcttggcagctttgcctatgactggctcaggaaggggattgataagatggcagctatctattggcttataggcttcgtagtattacttggcattgaggccgcaactatggctctgacaaccatttggtttgcagggggcgcgctggcggcgttcatactggcacttttgggtgcaggtgtggaagttcagctggcggtgtttgtaattgtttcatttgcactgctgttcttcacaagaccgtttgccttaaagtatgttaaccggaataccgtgaaaaccaattcggaaagtctgattggaaaacatgcgaaggttacagccgaggtgaacaacatggaaggaacgggtgcagctgttttgaacgggcaggagtggacggcaagagccgaggatgacgggaacatatattccgtcggtacgctcgtggaagtaaaggacatcagaggagtaaaactaattgtgagcgagactcaggaggaaatgtagtatgggagctttttttgcagtaattatagtactgattattattctggcactgcttgcgtcatgtatcaggattgtaccgcaggcacaggctctggttgtggaacgtttgggagcttatctgggaacatggtccgtaggtgttcatatcaagatgccgattctcgaccgcgtggcaaagcgtgtgaacttaaaggagcaggtggctgatttcccgccgcagccggttatcacaaaggataacgttaccatgagaatcgacacggtcgtcttcttccagattacagatccgaagctttatgcttacggtgtggagaatccgctgatggcgatcgaaaacttaacggcaaccactcttcgtaacatcatcggtgatctggaactcgaccagacactgacctccagagagacgattaatgcaaagatgagagaatccctcgatatcgccaccgacccgtggggcatcaaggttaaccgtgtggaactgaagaacatcatgcctccggcagcgattcaggatgccatggagaagcagatgaaggcagagcgtgagcgccgtgagtccatccttcgtgcggaaggtgagaagaaatctaccattctggttgcagaaggtaagaaggaatccgccattctggatgccgaggctgagaagcaggcagcgattcttcacgctgaggctgagaaggagaagagaatccgtgaggcggaaggtcaggctgaggctatcttaaaggttcagaaggcaaacgcagacggtatccgaatgattaaggaagcgggagccgatcaggcagttctgacgatcaagagcttagaggcccttaagacagtggccgacggcaaagcaacgaagattattatcccgtccgagattcagggactggcaggacttgtatcctccatcactgagatcccgaaggatcccaaataggaacgtgaaaggtaattagagaattcgcagcagggggcaccggctctcatgctgcgatttttcaatgcaggtatcccgttaggaggcgtgaatggagttaaagctggatttgaccagagaatacggtatcgttttagagggcggaggagccaagggagcctatcagatcggcgcctggaaggcgctccgggaggccgggatccgcatcaaagggatcgcaggcgcctctgtcggttcgctgaacggcgcgctgatctgtatggacgatttagaaaaggcggaagaaatctggaaaaacatcgagtattccagggtgatggatgtcagtgacgagaccataaaggcattaaagcggaaagacttcaaggcgcttaatatgcaggaaatcttaaacagcggagttcagtttatcaaggatggcggcttcgatgtgacgcctcttaagaatctgatcgctgaggtggtgggcgatgaatcgcgtatcagggaatcggaccgtgaactctttgccgtgacgtattccgtgtccgagcacagggagctggctgtggatgtgagaaaaggggaagagggttcggtgaaggatatgctgctggccagcgcttatttcatggcgtttaagaatgaaaagctgggcggcaagcgttaccgggatggcggcggcttaaacaacgttcctctgggggttctgctggataagggctatgaggatattatcgtgatccgcatctatggctggggctttgacagcgaaaaggtgacgaagattccggagggcgtcaatgtgtatcatattgctccccgccaggatctgggcggcatactggaattcgacaaaaagcagagcagaaaaaacatgactttggggtattatgacgcgaaaaggttcttatatggacttgcggggcgtatatattatattgatgcaccaggttccgagccttactactttgataagatgatgtcggaactggagcttttaaagatttatgtcgaagaagacctggatcaggagaccagggagagcttaaacggttaccggatgtttacagagaccctgtttcctcgtatggccgaagagtttaagctgaaagaggactggaactaccgggatttatatatagcgattctggaggatttagcgaagcggcttaagatcaaccggtttcagatttatacggtggaccgcctgatcggaaaaataatgatgaagctgcactctcttgacagccggattccattatagtaatgtaataggaagaaaagacgtttcatacgttaaatatcggattcatgaaaaaaagattgcatgtttatgcatgatatactataatagtgtataaaaatacaaaaagaaaagtggaggatgcatgatgaatctgaaaggaagaagtttcattacattaaaagactatacaccggaggagatcaattacctgctggatcttgccgcggatttaaaggctaagaaaaaaagcggagtaaccggaagctccctgaaaggaaagaatatcgccctgatctttgaaaagccatcgacacgtaccaggtgttctttcgtcgtggcagcggtggatgaaggggctcatcctgagtatctgggcaaggatgacattcagctggggcacaaggagagtgtggaagacacggcgcgcgtgctgggaagaatctttgacggtatcgaattccgcggattcaagcataaaacggtggaagatctggcgaaatacgccggcgtgccggtgtggaacggtttgacggacgattaccacccgacccagatcctggcggacttacttaccatgaaggaacatttcggttacttaaaggggctgaactttgtctatgcaggcgacggacgcaataacatggccaacagcctgatgatcggtatgagcaagatgggcgtcaactttacgatcctggctccgaagtgcttatggccgaaggacgagctggttaccctgtgccgcggatatgcaggtgagagcggaagcagtgtcaccctgactgagaacgaggatgacgtaaagggggctgatacgatctataccgacgtatggtgctccatgggagaggaagacaaggcagccgagcgtgtggcgcttttaaagccttaccaggtgaatgcagcgctgatggagaagacggaaaaggataccaccatcttcatgcactgtctcccggcagtgaagggcaatgaggtaacggaagatgtgttcgaatcaaaggcctccgtggtattcgatgaagcagagaacagaatgcataccatcaaggcagtgatggtggcgacattaggagaatagaacatgtatatacaggaacgaagcagaaacccgagaaacttatccatgatgctggatgcggcccatattattataggaatcctgatcgtcgtgctggcggtcatctcatttttgaacccggaggaccatatgctgctgtttccggtcattttcctcctcgcggcgtcactcaatatcatgaatgcggtctttaagatccgtatgagcggccgcgaaaagaagaaaaaggcctcaggtattctggttctcctgtttggaattgtactgctggcccttgcagtgatcagtgcagtcagtatctggtgggggtgagcgcggtgaagacagagattttgaaattactaaaagaagagtccggatttgtatccggacaggagctgtgcgaccggtttggcgtgtccagaacggccgtgtggaaggccattggccagctgaaggaagaagggtttcagattgaggcggtacgcaacaaagggtaccgtctcttaagcagcgatgacgtgattacggaagccgagcttatgagctgcatggaaggcggactggtcaggaagattgtctattacgaagagaccgattctaccaatatacgcgcaagaaagctggcggaggaaggtgctccggatggaaccctggtggtcacggattttcagaatgcaggccggggcagaagggggcggatgtgggtatccccttccggaacgggtgtctttatgagcctgatcttaaggccggatattcttccctcgtcggcctccatgctgaccctggtggcagcgctggccgtccatgacggtattaaagagacgaccgggcttgacaccgttatcaaatggccgaatgatatcgtgggagacggcagaaagctttgtggtattctgacggagatgagcgctgaactggaaggaatccattacgtggtcaccggcattggcatcaatgccaatatgacggagtttccggaggaagcaggggaggtggcttcctccctgcgtatcctgacaggaagcccggtgcggcgcagcaggctgattgcctctgtgatgaaggcgtatgagggttactataaaaaattcagggaatgcggcagtttagccagcctcatggatgtatataatgaacatatggcgaatctcggaagagaagtgaaggttctggatcccgcgggcacctatacaggcaaagcgctgggaatcgatgagaaaggcgagcttatcgtcgagaaagccgatggaaaggtaatccgtgtggtctccggagaggtttctgtccggggaatttatggatatgtataagtatgaataattattctttttatgatcaactgcagacgctggaaccgaagaaggatgaattttcgaaggaagagcgtctgagggccatggagaagccgctgctatcctggtacaaaggccatgcgagaattcttccgtggcgggaaaatccggagccataccgtgtgtggatttcggagatcatgctgcagcagacaagggtggaagccgtaaaaccgtattttgagcggtttatggaggcacttcccgatacggcggcgctggccgctgtgcctgaggacaggctctttaagctgtgggaagggcttggctattacaatcgggcaagaaacttaaaaaaagcggcaggcgtagtgatggagcagtatgggggcgtgcttcccgcttcctgggaagaactgaaaaaacttccggggatcggttcctatacggccggagccatcgcttccattgcctatgggattcccgtgcccgccgtggacggcaacgttctgcgtgtcatatcccgcgtgacggggagcagggaagatatcttaaagcagtcggttaagaaacagatggaggacctgcttctcggcgtcatgccccgggagggggcaggaaactataatcaggcgctgattgagatcggagccatcgtctgtgttcctaacggggagccgctttgcagggaatgccccatggcgtccgtatgtgttgcgagacgtgacggactcacaaaggagattcctgtaaaaacgccgaagaaagccagaaggattgagaagaagacgatacttgttctggactggaaagggcgcacggcgatccggaagcgggaggacagcggccttttggcgtccctctatgagtttcccaacgaggatgggtggctggaggaggaggcgcttgctgaaacgtaccgtgtaccgctgacggcggtccggtgtctgccggaggcaaagcatattttcagccatgtagagtggcacatgaggggattcgccgttgaactgcaggaaaaaccggcaggagattacctgtgggtgactccggaagagatcagggagacgtactcactgcccggggcgtttaaggtgtatactatgagcacttgatgaggtagtttacgaatctagtgcgagtcatacctgagcacttagtgaggtagtttacgaacttagtgcgaatggtatactatgatgataaggtgagaataatgagaaaaatgctgtttatctttaatccacgttccggaaaggcacagatcagaaaccggttgatggatattctggatatcttcacgaaagccgggtatgaagtatcggttcatgtgacccagcggccgaaggatgccatggaggttgccgcggcgagaggaaaagacgcggacatcatcgtctgcagcggcggtgacgggactctgaacgagaccatcagcggcatgatgacgctggaccggattccggatctgggatatattcccgccggttccaccaacgattttgcctccagcttaaaaattccgaaaaatatgattgccgcggcgcatttggcggtggagggggaagcgtatcctgtcgatatcggcagcttctgcggggacaggaatttcgtttatattgcagcctttggcgcatttacggaagtttcctacttaacaccccaggacaagaagaatgtgctgggccatcaggcctacatgctggagagtgtgaagagcctgacttccatcaaatcctaccgcatgcgtgtggagagtgaagagattacgctggaaggggaatttatctttggaatggtgacgaataccatcagcgtgggaggctttaagggacttgtcacgcagaatgtggctttgaatgacggcgagttcgaagtgctcttaatcaggactccgagaacgccgctggatttaagcaacattgtcaactacatgttcctgaaggaagagcctaacgaatacgttcataagttcaggacaaaggcgctcacggtgattccggaagaaccggtagactgggttctggatggggaatttggaggtacacgcatggagactcagatcataaatctgcaaaaacagatccggattatgagaaatctttccaaaaaacaataaatctgcaatttaacgcagaaatatgttgaaatatgtaatccggtagtatataatgaaaagttgtgtgggcttttatgtatacttcttagcgaaaggacgttattaagtggaaaaagataattttttagagaagctggggaagctcgtggaactgggaaaaacaaagcataatgctttggacgtaacggagattaacaacttctttatgggggactcactgaccccggagcagatggatcagatctattcgtacctggagaatcgcggcgttgacgtgatcccggtaattgatgactcgatactggctgatgatgtgctcctgtcagatgatgctctgctgctcgacgatgatctggatgacagctttataaaaggggcagacgaggaggatattgacctcgatgccattgacttgctggagggaataggtacagaagatcctgtccgcatgtatttaaaagagatcggtaccgttccgcttctgagtgcggacgaggaactgcgtcttgcaaagagaaaggccgatggggatgaagatgcgaaggaacgcttgatagaagcgaacttaagactggttgtcagcatcgccaaacggtataccggccgtggtatgagctttttagaccttgttcaggaaggaaatttaggtcttattaagggcgttgagaagttcgattatacaaaaggttataagttaagtacatatgctacgtggtggatccgtcagtccgtaacaagggcacttgccgatcaggcgaggacaatccgtgttccggtgcatatggtcgaaaccatcaataaaatgtcaaaaatgcagagaaagctgacgctggaactgggctatgagccatccgttaccgagctcgcagacgcactcgatatgtctgaggacaaggttatggagatcatgcagattgccagagaaccagcctctctggagactccgatcggtgaagaagatgattccaacttaggcgattttgtcgctgacaacaatgtggtgactcctgagggaaatgtggagtctgtgatgctccgggagcatatcgacgcattgctcggtgatttaaaggagagagagcgccaggttatcgtactgcgcttcggcctggaggatggacatccgcgtacactggaagaggtaggcaaagaatttaatgtaacacgtgaacgtatccggcagattgaggcgaaggcacttagaaagctcagaaatccggtgcgcagcaaacgaatcagagacttcctgtaggaagcagaaaggaggcgtggcatgagagtgcacacgccttttttgggtcccatggaaaacgcttccatgaacatgcagggcgttattccatacgaaacttatagacggcggcgggttccataaggagcaccattcttcgcctgtgaatcagaggaggatataagaggatgaaccacagaaattatcagaaagagctggacaccatactggaagactttgagaaacaggggaaggtgccgagactgctgcttcacagctgctgtgctccctgcagcagctacgttctggaatacttatcgaaatactttgagattacgctgtactattataacccgaatatctacccgattcaggagtatatgaagcgggtaaaggagcaggagaagctgatctccgagatgaagtttgtgcatcctgtgcttttccggacaggaccctatgagccggatgaatttttccggattgctaaagggctcgagaaggttccggaaggcggagaacgctgttttaaatgtttcgatttgcggctccgggaggctgcaaaggtcgcatcggccggccgctatgattattttacgacaacgcttaccatcagcccgttaaaaaacgcggacaagctaaatgagatcggagagaagctggcgaaggagtaccgcgtggcgttccttccctccgattttaagaaaaaagacggatataagcggtctgtgcagctgtcggaagactacggtctgtaccgccaggattactgcggatgcatatattccagggaggcggggaaataggctgaaacaacttgacaccaaatgggaattgtaataaaattgacactaaggagtatatagattagaggataaaggagataatattatgttaacaaaaacacttactgttgtaaatccatccggacttcatttaagaccagcgggagttctttcccagacagccatgaagtttaaatgcgacatcatcatcgagtgcggcgagaagagaatcgttgcaaagagcgtattaaacgttatggcagcaggcatcaagtgcggtacagagatcaacttaatctgtgacggcgaggatgaagaagaagctatgaagagcatgagcgaagcgatcgaaagcggactcggcgagatgtaatggacaagttttaaaaagcgaatgacaggtagaagcttggcggagaggaaatgattcttttccgccaattttttttgccgaaatacagcggggtatctggcgtacagcctgccgccgatgagaatgttcatatattgacgggagaaaattatgggtacaggaattatgatatgcggcttaaatggtactggaaaaagtacattaggaaaagcccttgctgagaagctgcatttttatttcatagataatgaaaatctctatttttccgggacagagctttcctgcgtctatgccgatccgcgtacccgcgaagaagctgaaactcttcttttccgcgagatgaatgcacatgagaattttgtgtttgcttctgtgaaaggagattatggggaagctgtctgtcccttttttcagtatgcggtattgatttctgttccaaaggatattcggctgcagcgggttaaaaaccgttcttttcagaaattcggcagcagaatgctgccaggcggagatttatatgggcaggaggaacggttttttgattttgttaaatccagatcagaggatacggttgaagaatgggtacagggattaagctgtcctgtcataagaattgacgggagaaagcctgtggaagaaaacataaatcttatcttgaagcaaataaattttcatactctgagtgtgtagttaagaagatcattgagaaatactggaaaaaggttaatcgcaggtaaaaaatccgcctaaattgttgaaaattattagattaatacaaaaaatagatgaatataagggatataacaatgaaatgtcaaataatctgacatcttatgcaaaaaaaggggtttacaaatggaaccggatgtagtattatctaaaaaagttaaagcaaaggcagagagcggcagaagccgaagatgtcataataagaaaatatggaacacaggcccgacgacgagcatagtaagccgcgggtctgtgtttttttgatattacaggaaattactcctgtggtatcaaaaagccatccgagcaggaccgccctgcggcgggccgccttgtgcttcgacaaaaaatctgccgctgcttggtacccctgttaaaaagtacagccagaaaggatgaaattatggttaagaattcaaaatctcccacagaaaaaaaagtgccggatttatacgattcccgctttgagcatgacaactgcggaatcggtgcggttgccaacatgaaaggcataaagagtcacaaaacggtggagcaggcccttcatatcgtcgagaatttagagcaccgtgcagggaaggatgcggagggaaagacgggcgacggagtcggcatcatgcttcagatttcgcacaaattttttaagaaggtcacgaaatctctcggcatcgaaatcggaggcgagagagagtacggagtcggtatgtttttctttccccaggatgagcttgccagaaaccaggcaaagaagatgtttgagattattgtaagcaaggaaggtctggagttttcaggctggagagatgtggagacgcatccggagctgatcggcaaaagagcggtggactgcatgccgtatattgcccagggctttgtaaagaaaccggccgatacggagaaaggactggactttgaccggaagctttacgtatcacggcgtgtatttgaacagagcaacgacaatacatacgtggtatcgctgagcagccgtacgattgtatacaagggaatgtttctggtaaaggagctgcgcaggtttttccctgatttacaggataaggattatgagtcagccattgccgtggttcactcccggttcagcaccaacacgaatccaagctggatgagggcgcatcccaaccgcctcatcgtccacaacggtgaaatcaacaccatccgcggcaatgtggataagatgatggcgcgggaagaaaccatggaatcgaagtattttaagtacgatatgcacaaggtgctcccgatcatcaatcaggagggctctgattccgccatgctggataacgccctggaattcatggtgatgagcggcatggagcttcccctggccgttatggtgaccatcccggccccctgggcccacgataaatccatgcctcaggagatcaaggatttttacagctactacgcaaccatgatggaaccgtgggacggaccggcctccatcgtattttccgacggtgatctcgtcggtgcggttctggacagaaacgggcttcggccgtccagatactacattacagatgacgatcagatgatcctggcctcagaggtgggtgccatcgacattgaacagaaccatgtggtcagaaaggagcgcctccgtcccggaaaaatgcttctgatcgacaccgttaagggctgtctggtgtccgacagcgagctgaaggagacgtatgcgtcgaggcagccttacggcgaatggctggattccaatttaatcgagctgaaggatctgccgatccccaacaagggggttccggatatgagtgcggaacggcgctccagacttcagaaagcctatggctatacctacgaggaatacaagaccatgattcttcccatggccttaaacggagcagaggcggtatctgccatgggagccgacagtccgctggcagtgctgagcagaaagcatcagccgctgtttaactactttaagcagatgtttgcgcaggtgacgaatccgccgattgactctatccgggaagagattgtgacgtcgactgcggtatacgttggcgaagaggggaatattctggaggaaacggcggaaaactgtaagattctgaaggtcagcaacccgattttgacatgcacggacttaatgaagatcaaatacatgaagcggccgggtttccagacggaagtcattccgatcacctattataagaacacatccctggaaaaagcgattgacagactgttcctggaggtcgaccgggcacaccgggatggggcgaatattatcattctctccgatcgggatatcgatgagaatcacgtgccgattccgtcgcttctggcggtatccgccctgcagcagcatctggtgaagacgaagaaacgtacctctgtggcgctgattctggagagcggagagcccagagaggtacaccatttcgccgcccttttaggatacggggcctgcgcggtcaatccgtatctggcgcaggaatcgatccgggctctgattgaaagcggaatgctggaaaaggactattacgccgcggtggaagattataataacgcagtactccatggaattgttaagattgcgtcgaaaatgggcatttccacgatccagtcgtatcagggggcgcagatctttgaggccatcggcatttcaaagagtgtggtggaaaagtattttactgatacagtgagccgcgttggcggcattacgctggacgatatcgccaatgatgtggatacactccattccatggcttttgatcctctggggcttgatgtggatctgacgctggagagcgtcggaagccataaggcgagggcaggtcaggaggaacatctctacaatccgcttaccattcatttgcttcaggaggcggccagaacgggaagctacgagacgtttaagcagtacacgcacgcactgaatgaagaaggccagacggtgaatctaaggagcctgatcgacttcgattatatgaagcagaaggccgttcccatcgatgaggtggaaagcgtggaatccattgtgaagcggtttaaaaccggcgccatgtcctacggctccatctccggagaagcccatgagaccctggccatcgccatgaacaggattcatgggaaatccaacagcggcgaaggcggagagagcctggagcgtctgacggtgggcgccgacgggctgaaccggtgttctgcaatcaaacaggtggcttccgggcggttcggtgtgacctcgcgctatttagtcagcgcaaaagagatccagatcaagatggcccagggggcgaagcccggcgagggcggccagcttccgggcggcaaggtgtatccgtgggtggcaaagacgagacattccacaacgggagtgggactgatctctccgccgccgcaccacgatatctactccatcgaggatctggcgcagctgatctacgatttaaagaattccaacaccgaggccagaatctcggtgaagctggtatcggaagcgggggttggaaccgtggcggcgggtgtcgccaaagcgggggcacaggtgatcctgatttcctcttttgacggaggcacgggagcggctccgagaaactccatttacaatgcaggacttccatgggagctgggagtggcggaagcgcatcagactctgatcatgaatggtctgcgcgataaagtgattctggagaccgacggcaagctgatgacaggccgcgatgtggcgattgcctgcatgctgggcgccgaggagtttgggtttgcgacagcaccgctcgtaaccatgggctgcgtgatgatgcgcgtctgcaacctggacacgtgtccggtgggcattgcaacgcagaatccggagcttcggaagcgttttaagggaaaaccggaatacgtggtcaatttcatgtatttcattgcccaggaactgcgggagtatatggctaagctgggaatccgtacggtggatgaactggtgggacgcaccgatctgctgaagaagaaggagcatatttcctccaaacgggcggataaggtagatctgtccgctatactgggaaacccgtacgcgggccaaaaactggccggttacaaccacaaatcagtctacagctttgaactggagaagacgattgatgaaaaaatccttttgaagaagctgagaccggcactgatcaacgggcagaagaagagcattcagatcgacgtttccaacacggaccgtgcattgggaaccatgttcggatctgagatcacgaggctgtatcccgaaggacttccggaagatacgtataccgtgaactgtacgggaagcggcggccagagctttggtgcgtttattccgaaggggctgacactggagctggtgggagacagcaatgattacttcggcaagggcttatccggaggaaagctgatcgtctatccgcctaagggtgtgacctttcgggcggaggaaaacatcattatcggcaacgtggctctatacggggcaaccagcggaaaggcgtttatctgtggagtggcaggcgagcggttctgtgtacgcaattccggcgccaccgcggtggtggaaggcgtgggagaccatggatgcgagtatatgacaggcggccgtgtcgttgtgctgggatcgacaggcaagaattttgcggccggtatgagcggcggaattgcctatgttctggatgaaaaaagggatttgtataagcggctgaacaaggagatggtttcctttgaggaggttaccaataagtacgatgttctggagctgaaggaaatgataaaagagcatgtggcttacaccaattctgcaagaggaaaagagattctcgacagctttggagagtatcttccgaaatttaagaagattatgcctcacgattaccgccggatgatgaataccatcgtccagatggaggagaagggcttaagcagtgagcaggcacagatcgaggcattttatgcaaatacgaagaagtgaggaggaaaaacatgggaaagccaacaggatttttagaatatgacagaatgacaggaagggcggcagaccccaaaagccggattaagaattacgatgaattccaccttccactttcggagaaggagcagagatgccagggagctcgctgcatggactgcggcgtgccgttctgccagtcgggagtgatgataaagggaatggtttccggctgtcccctgaacaatctgatcccggaatggaacgatctggtctatacggggacgtgggaccaggcgtataaccgtttaaaaaagaccaacagttttccggagtttacctcccgggtgtgtccggctccttgtgaagcggcctgcacctgcgggttaaacggaactccggtggcgattaaggagaatgagggagccattatacggcgtgcttatgagacgggtatcgccggcccgaagccgccgaagatcaggaccgggaaaacggtggccgtcatcggctccggcccggccggtctggctgcggcggaccagttaaataagcggggccacagtgtgacggtgttcgagcgggaagaccgcatcggtggtctgctgatgtatggaatccccaatatgaagctggaaaaatgggtgattgaccggaaggtggaggtgatgaaggaggagggaatctcgtttgtcacaggagccgatgtgggaaagaaccacaaggcaaaggatatcttaaaggattttgaccgcgtgatcctggcctgcggtgcgtccaatccccgcgatattaaggtgccgggaagagactcggagggaatttattttgcggtggattttctcaaatccacgacgaagagtcttctgaattccaatatgcaggataagtcgtatctgccggcgaagggaaagcatgtgattgtcatcggaggcggtgatacggggaatgactgtgtgggaaccgtcatccgccacggctgtgcgtcggttcttcagctggaaatgatgccgaagcttcctgagaagaggacgcctgacaacagctggccggaatggccgcgggtgacgaagacggactacggtcaggaggaagccatcgccgtgtttggctccgatcccagactgtatcagacgacggtgaaggagtttgtaaaggataagaacggaaaagtggcaaaagccgtgcttctgtcgctggaaccgaaaaagaatgagaagacaggccggatcacgatggaaccggtggccggaagcgagaaggaggcagctgctgatctggtactgattgccgcgggattttcagggtgccagagttatgtggcggatgccttcggcgtgaagctggatgcaggaacgaatgtggagacagaggcaggaagatataagacgaatgtggagcgggtgtttaccgcgggggatatgcggagagggcagtcgctggtggtctgggcgatccgggaaggaagagaggcggcgaaggaggtcgatgagaacctgatggggtatacgctgctggagtaaatgtgatgaagctggacgggggagaacacaggagactgggagaaaaaaataaaagccggaaatctttagctgcaggatttccggcttttatttcacggtaattgctatgattgcagtggctggttatacgttgaatcggaagagtacaacatccccgtcttttaccacatactcttttccttccattcggacaaggcccttttccttagccgctgtataagtgccgcagtcgaggagatcctggtagttgactacctcggctttgatgaagccgcgctcgaaatcggagtggatcttgccggcggcctggggggccttggttcccactttgatggtccatgctctcgtctctgttgggcctgccgttaaatagctgatgaggcccaggagatgatagctggcggcgatcagtttttcgaggccggattcggtaaggcctaagtcctctaagaacatcttgcgctcgtcctcctccagttcggcgatttcctgctcaatctgggcacagataacgaacacttcactgccgttccccgccgcgaagccgcggacctgctttacgtattcattggatgcaccgtcgtcggccaggtcgtcttcgcttacgttggcggcgaagatgaccggcttgtaagtgagaagatttaaggaggcaacgaattcctgtgcatcgtcatcatcaaattccatgctgcgggccagcttgccatcttctaagtgagccttcaccgcctttaagatctccagctcttttgccagagatttatcgttaaaagcgctctttgccgtcttggagattcgtctctccagaatctccagatcggagaagatcagctctaaatcgatggtatcaatatctcttaagggatccacactgccatccacgtggatgacgttgccatcctcgaagcagcggacaacgtgtacaatggcgtccacttctctgatgttggaaagaaactggtttcccagaccttcgcccttggaagcgccttttacgagtcctgcgatgtccacaaattcgatgaccgcgggagtgatttttgctgagtcatagagagcggccagctttcccaggcgctcatccggcacgggaaccacgcctacgtttggatcaatcgtacagaacggatagttggccgattccgcgccggcctttgtaagagagttgaagagtgtgcttttacctacattcggcagtccaataattcctaatttcataattcattaccttcctgtaattttattatctattgattccatccacatttcagagatcggactcaaaatgacataataactatgtttttttaggttgatttttttctgtaactaatatagaatagcatattatccataaaaataaaagagtcaaactgaacttgctcctgattttgtcgaattatggtcgaatatgtcgggcgaatctgtttgatttttggcatatcacggggtaaaataaagaaaacatgaaaggagaaaacaatggcaaatacggcagatattagttttgtgcatttggggattaccatcgaccatttgcagaacagtatctcgatatttggattccgcatagcgttttacgggattatcattgggattggaatactggctggtctctgggttgcgacgagcgacgcgaaaaggaggggacaggaccctgatatatatctggattttgccctgtatggaattatcttttctattataggagctcgtatctattacgtcatttttgactgggagaattacagggacaacctgattcagatctttaacttaagggcaggcggactggctatatacggcggggtaattgccgcggtcattacgctgactgtctataccagaaagaaaaagctttctttcttttcaatggctgacagcggctgccttggactgataaccggacagattataggaagatggggaaacttctttaactgtgaggcgtttggcggatatacggacagcctttttgccatgagaatcagaagagcgctggtcaacgaaagcatgatatcccaggatctgttaaaccatctgattgtgaaggacggtgtcgaatatatacaggtacatccgacctttctatatgaatcagtctggaacctgggggtattggcattcatgctgtggtatcgcaaacgtaagaagtttaatggggaaatgcttcttatttacctgctgggatatggtctggggagagtctggatcgaagggctcagaacggaccagcttatattctttaacacgggaattgctgtatcccaggcattgtcattggtattagtagtgatatcagctttggtgctcatctggaaacacagacagatacgattaaagagcaaaggagaagactgatatgatatcaaaagaagagctgatctgcaagatcgaagaggcaagagataaattaaacagaagtattgacactgagcaggacagcggcactgtctataaaagaagtgtggagctggatcaactgatagaacaatatatagtagccggttattaaaaatagggtttgttttaaggcggtaacgtaatcatacgttatcgtcttattttttttgtgttttttagaaaattaccttgctatttccttacaaatgtactaaaattaatctacaagtggtggaaagtggtacaaagtggtagagaatggaggaagagtggtgtaaactctctctccgatgtacaagcaggtgattagtatgttcatgggcgaatacaatcatacagtcgatgcaaaagggcgtctgatcgtcccgtcgaagttcagagaacagcttggtgaagagttcgtcgtgacgaagggcttggatggctgtttatttgtgtatgacaacgaagagtggaaagcccttgaagaaaaattaaaaagcctgccgctgaccaacacaaacgccagaaagtttaacagattctttctggccggtgcatcttcctgtgaagtggacaagcagggaaggattctccttccggctgtgctccgtgagttcgcgggtatcgaaaaggatgcagtgcttgtgggtgtaggaagccgcattgaaatctggagcaaggatgcgtggacagcagccaatacatatgatgatatggaagaaatcgctgagaatatggaaggacttggaatatgatgtttgaacacaagtcagtgctgctttacgaaaccattgacagcctgaatgtaaaaccagatggaatttatgtggatggaacgcttgggggcggaggacatgctctggaagtatgcagacgcctcggggaatacggaagattaatcggaattgaccaggatgcggacgccatcgcggcggcatcggagcggcttcgtgactatgaagacagagttacgatcgtgagaagcaattacgaagagatacaatcggtactaaaggatttagggatcgaaaaggcagacggcatttatctggatcttggagtttcctcctaccagctggacacaccggaacggggatttacgtaccgggaggaggacgctccgctggatatgaggatggatcagagaaatacacggacggccgccgatatcgtgaatacgtacagtgaatttgatttatacagaataatccgtgactacggagaggacaagtttgctaagaatatcgcaaaacatatcgtgagggccagagagacaaaacggattgagactacaggagaattaacagagattattaaggaagcggttcccgcaaaggttcgtgcggtgggcggtcatccttcaaagaagacgttccaggcgatccggatcgaactgaatcaggaactggaggttttaaataattctattgatacgatgatcgacttattgaacccgggtggaaggctggctgttatcaccttccattcgctggaagacagaatcgtaaagattcgcttccgtaataatgagaatccctgtacctgtccgccggattttccagtctgtgtctgcggcaaagtcagcaaaggccgggtaatcaccagaaaacctgttgtaccgtcagaagaagagattaacgggaacaagagatcgaagagttcgaagcttcgagtatttgagcggatttaaaaagggaggaaaagagcatggctgctagaaagaatgtgcattcttaccgtagtgctgcctacgtacagggaaatgctgtccgtaagctggaacctgagcgcgtaccggtaagacgttcaccagatgaagtacgccgtccggctgtaaaccataaagtcagacggaaccgtgaaaaagccttacagatggatttgccttatgtaattatgctgaccatcgcagcagtctgtacgctctatttgtgtgtgaattatctgcatcttcagtcttccatcacgacgcggattcatacgatcgagaacctggaagcggagctggagatgttaaagactgagaacgatgccctgcagacgaacattaatacttccgttgatttggaccatgtgtacaaagttgccacagaggaacttggcatggtctacgccaataaaaatcagattcttcagtatgataagacggaaagtgagtatgtaaggcagaatgaagacatcccgaaacactaagcataaaaatagaaaaacgaagatatttccaagatacatgcaggaaaagctggcgattaccgtcttggtagttacgctggctttgtttgcattggttatggtcttatacgatttgatgaccaacaaaaaggatgattttaaccagatcgttctgtcacagcaggagtatgacagccgtaccattccgttccggcggggcgatattctggaccgcaacggaacgtatctggcgacgagtgagaaggtgtataatctgattctggatcccaagcagattatgtcggacccggatgcctacttagaggcatcggtaagcgccctggtggactgcttcggttacgaccggacggagatgatgaatctgatcaatgagaaaaaggacaaatactatatccgctatgccaaacagctgacttacgatcagaaagaaaattttgagaagtataaggaccagaagagagatgagttcaagaaggccggagacggaaagggcattcgcggaatctggtttgaagatgaatataagagaatctatccctacaattctgtgggctgcaatgtgatcggttttgccagagacgacggcatggacggaagcggcgggatcgagcagtactacaactccacgctgatgggaaccaacggcagggagtacggctatttaaatgacgattccaatctggagcgggtcatcaaaccggcgtccaacggcaatacggtcgtatccacgattgataccaacgttcagaagattgttgagaagtatattacggaatgggaacaggaagtcggaagcaaacgggtgggggttatcgtcatggatcccaataatggtgaggtcctggctatggccaacgataagtctttcgatttaaacaatcccagacagctccgtccggagtacacggacgatgtggtgaagcagctgggcattcaggaggctatcgacgattaccgcagaaaaaataaggacgcggaacctctgacagaggacaacgtttacgcccactactccaacgatgagatcatgtccctcggaaagcaggtggcgtggaatcagacgtggcgtaatttctgtatcagcgacgggtttgagccgggttccactgccaagatctttacggtggcggcggcgctggaggaaggcgctatcaccggcaatgagacgtatacgtgtaacggtaagctggagatcggaggctggcccatcagttgtgtgaaccggtacggtcacggcgatttaacggtggagcagggtctgatgaagtcgtgtaatgtcgttatgatgcagatcgcccagaaggtgggaaagcagaaattctacaaataccagcagcagtttggcttcggctccaagaccggtatcgatcttccaggcgaggcggacaacaaggctcttatgtatactgcggagaccgctgatccggcatctcttgcaaccaacgccttcgggcagaactttaactgctccatgattcagatggcggcagcctactgttcggtcatcaacggcggatcgtattatgaaccccatgtggtgaagcagattttaaatgaacagggatcgattgtgaaaaagatggatccggtactggtccgtgagactgtttcggaatccaccacaaagtttattaacgaggctctctataagacggtaaacgcccagggcggtaccggctctgccgccagggtggaaggctataaaatcgcaggtaaaacaggaactgctgagaaggtagggcgtgacaagaaaaactatgtcgtatccttctgcggctatgcacctgccgataatccccaggtacttgtatatgtggtcgtggatgagccgcatgtggaagaacaggctcacagtacgtatgccagcggaatctttcagaagattatgacagagattcttccttatttaaatatattcccggatacggatattacgccgtcacttccggagggcgggcaggcagaactgccatccgaagagggaatcaccagctccacagaaggctcttcagaagaatctacggaggagagcacagaagcgggaacactggaaaatggagagacgattccgccggaggctctcgatccttccgaggaagcggtaatcggtccaagcgaagaggcaggctacggccttccgggcgcgctgccgggacagacgaatccggtgcggctgcctcagaccagctcctcgtccgcagaagcttccgaaacggagacaaagggagaataaaagtgcaggaatttcatatactgtaacaatgatgacggtggagcagcgtatgaattctaataaaacacatcacagagagaagatagccatcctgtttttcctgttatttcttgccatgacaggtctaatggggcggctgttttttcttatgatatttcagtccgcccattacagcgccatggcggaggacttgcatgaaagagagagaacgatcaaagcggccagaggcaacatcattgatgccaatggaaccgtcatcgccaccaacaggacagtctgcaccatttcggtcatccacaatcagatcgaagagtcggatcaggtggtgtcggttttaagcaaagaactgggaatcgaggaagatgctgtcagaaaaaaggtggaaaagtacagttccagggagattattaagaccaatgtggacaaagccctgggcgatcagatcagaacgtaccacttggcgggggtgaaggtggatgaggattacaaacggtactatccatacgacagcctggcctccaaggtgctggggttcacgggaggagataaccaggggatcatcgggctggaggttaagtacgaggattacttaaaggggatgaacgggaagatcttaaccatgtccgacgcggcaggcatcgagattgaaaacgcagcggaggaccggatcgaacccatcgccggacaggatttacacgtaagtcttgatgtgaacatccagaagtactgcgagcaggcggcgtaccaggtgatggagaaaaagggcgcaaaacgggtctccgtcatcgtcatgaatccgcagaacggggagatcatggctatggtgagcgctccggaatttaacttgaatgatccgtttacgcttccggaggacccgggaaatgtgagtgccaaggagaaacaggagctgttaaaccagatgtggagaaacccctgcatcaacgatacttacgagccgggatccacgtttaagatcgtgacggctgcagcgggcctggaagcgggagtggtgaatctggaagaccatttctcctgtccggggttccggattgtggaagacagaaagatccggtgtcacaaagtggggggccacggttccgagacctttctgcaggggatgatgaattcctgcaacccggttttaatcgatgtggggcagcggctgggcgtggacaattactataagtattttgagcagttcggcctgaagggaaagacgggaatcgatctgcccggtgaggccgcaacgatcatgcacaagaaggagaacatggggctggtggagcttgccacggtttccttcggccagtcgtttcagattactcccatgcagctgattaccacggcctcggccatcgtaaacggaggcacccgggttacgcctcattttggcgttcaggcggtcagcgcggacggcgaggtgattcacaactttacctatccggtgaaggagggaatcgtttcggcggagacgagcgaaaccatgcgttatatcctggaaaaggtcgtctctgagggaagcggaaaaaaggcgtatctggaggggtaccgcataggcggaaaaacggctacatcggaaaaacttccgagaagcctaaagaaatacatttcttcttttattggctttgcaccggcggataatccgtccgtaatcgctctgattaccatcgatgaaccacagggaatctactacggcggaaccattgcggcgcctgtcattgccgacatttttaagaatattctgccttatctgggaattgaagcaacagaggaaaaaactgtttcctcgtttcgattctatagttgattattcaggaaaaaagacgtatactactaactgtgccccattttgatgaacgaagcgaggggactgactgctgttttaaaagtacgaatacataaaatattgaggtgtgacatgattaacgagacgatactggcgattatcatagcgtttgccataagcgcgatactgtgccccatagtaataccatttcttcacagattaaaatttggccagcaggtccgggaagagggaccggaaagccatttgaaaaagcagggtactcccacgatgggcggcctgattatcctgaccagcatcatcattacttctctgttctacgtgaaggattatccgaagatcattccgattctgttcatgaccgttggttttggtattgtgggttttctggatgattatatcaagatcgttatgaaacgctccgaagggcttaagcctttgcagaagataatcggccagtttatcatcacaggcgtctttgcatactatcttctgaactcgaaggcagtgggaacgagtatgctgataccgtttaccggcggttttgaacacggtctctatctggacctcgggatcttctttgtgccagtcctgttctttattgtgctgggaaccgacaacggcgtgaactttaccgacggactcgacggactctgtaccagcgtgacgattctggtggcgaccttcttaacggtggtggctttgggagagaaggccgggatcagcccgattacaggcgcggtcgtaggaagcttactgggatttctgctgtttaacgtctatccggccagagtgtttatgggagataccggttccctggcgctcggcgggtttgtggcatccagcgcgtatatgatgcagatgccgatttttatcgcgatcattggatttatttatctggtggaggttctgtcagatattatacaaattacgtatttcagaaaaacaggcggaaagagattttttaagatggcgccgatccatcatcattttgagatgtgcggctggtctgagaccagagttgtagctgttttttcgattgcgacggcgattctctgcctgctggcataccttggactgtaaagaaggagagtaacctatgagtcagaaaatattagttgcagggagcggaaagagcggtattgccgcttcgaaaatggcgctcgatacagaacacgaagtgattctctacgacagcaatgaggcgcttgatgcggaggcggtccgggggcagtttaaagaggacgaggcaatagaagtgctccttggggaactgaaaaaagagtcattaaaggacgtgggcctctgtgtcatcagtcccggaatcccgcttgacgcaccgtttgtcgaagtgcttaaggcgtgtgagataccggtatggagcgagattcagctcgcttaccacgatgcaaagggaaagctggctgccataacggggacaaacggaaagacgaccacgacatctctggtgggagagatcctgagtgcatactataaagaggtgtttgtagtaggaaatatcggaacgccgtacacctccactgcactccgcaccacggaccagtcttatacggtagcggagatcagcagctttcagctggaaaccatcacggatttcagaccggatgtgagcgcgatcctgaatattacgccggatcatttaaaccgccataagacgatggactgttacataaacgtaaaagaacgcattgcagagaatcagacaaaggaggatgcctgcatcctcaattacgatgatccggtcctgcgccggttcggggagaccattgcaccgagagtcatctatttcagcagcagggaactgcttcctgagggaatctgtctggatggcgacatgatcatacgcaaccacgacggcgtgcgcatggagattatcaatatccatgatatgaacctgctgggccgccacaaccacgagaacgtcatggccgcagccgctatagccatggaactgggcgttccgctggagaccatacagagcgtgatccgggattttaaggcagtggaacaccggatcgagttcgtggcggagaaggcgggcgtaaagtactataatgactccaagggaacgaatccagacgcggcgatccaggcggtaaatgccatgccgggtcccacgatcctgattgcgggaggctacgataagaattccgagtatgacgaatggatcagatcgttcggcaaaaaggtgagatacatggtcctcttaggccagacgagagagaaaatcgccgagtgcgccgccagacatggctttaccaatgtcatgtatgcggaagacatgcaggaggcggtcagagtttgtgcatcctatgcgaatgccggagaatacgttctgttgtcacccgcctgcgccagctggggcatgtttaaagattatgaagagcggggcgacattttcaaggagtgcgtgcgtaatctgtagcaggatgcggtgatcgctcattaaagttttggcgaggaggaatgagatggcggaaaacaggcctaataagaagaaaaacaaaccgcgccgtttttatgattacagcctgctgtttacggtgatatttttgaccgtgttcggtctggttatgatatacagttccagctcctacgctgcccagataaagtatgatgatgcggcctattttatgatgagacaggcaaagatcgccctggccggctttgtcatcatgctgattatctccaagatggattatcactggtatgcaagatttgccgttctggcctatgttctttcctatgtgctgatgattgccacggcactgttcggtatcgagagaaacggtaagaaacggtggctcggagtgggcggtgcctcaatccagccgaccgagtttgtaaagatcgccctgatcgtcatgctggcatccatgattgtacagatgggcaagaacatcaacgaaaagaggggcgtggtgctggtaatcgtcaccacgctgcccatcgccggaattgtagcggccaacaacttaagttccggtattatcattgcaggaatcgcgtttgtcatgctgtttgtggcatgtaagaaaaaatggccgttttttgcctgcgggttcgcaggcgtgggggtgctggcatttgccggccccattgcgacggccctggagaagatcggtcttttgaaggaataccagcttagccgtatcttcgtctggctggagccggagaaatacccttccaccggcggttatcaggtgcttcagggattatatgccatcggttccggcggactggtggggagaggcttaggggagagcatccagaagatgggattcgtacctgaggcgcagaacgatatgatattctccatcatctgtgaggaactgggactcttcggagccgtgtcggtgatcctgatcttcctgttcatgatctaccggttcatgctgattgcagacaacgcgccggatttattcggtgctctgctggttgtaggtgtcatgggccacattgcgattcaggttatcttaaatatcgccgttgtgaccaataccattcccaacacgggaatcacgcttcccttcatcagttacggaggcacgtcggttttgttcctgatgatggaaatggggatggttttgagcgtttccaatcagatacgtctggaaaggtgaaagtccccctcattttattcggcggaatgtgataacctttttcccgctttttacataggatagtatataagaagccacgggaggtatcggattgtcggtcatagaagtccaggggcttacgcccttagaaggtgagataaagatccagggttccaagaatgccgttctgcccatgatggcggcggctattcttcataaaggcacgacagtaatagaaaatgtccccaggatacaggatgtgttctgtatgctggggatacttgacagtatcggctgtaaatgccgtttggaaggaaaccggctgaagattgatgcatccgtagttacagagacggaaatacccaaaaagtttgtgaagagtatgcgctcctcgatcattgtttcagggccgctgttaggacggatgaagagagccgttaccagctttcccgggggctgctccatcggggaacggccgattgacttacatctggcggcgcttgacgcgatgggagctataatcgaaaaggacggagaggaattaaaggctgttacgggacagctgacgggagccgatatccacttcccgtttccgagtgtgggagcaacagagaacgcgttgatggccgccgtgctggcggagggcgttaccgtgatccacggtgccgcacgggaacctgagattgaagaactctgtctgtttttaattggtatgggtgcccggattcatggagtgggaagttcgaacctggtcattgaaggggtggccggcctccatgactccatatttaccgtaaccggcgacaggattgtggccggtacttatcttcttgcggtcatggccgcagagggaaatgtgactctgacgggaatccggccggctcacatggaagcggtgctgcgctgtgcagaggagatgggggcagaggtcaggagatacgatgaccggatttctgcagccatggtgggccgtccgtcggggtatcatgtagtgaccagcccgtatcccggctttccaacggatttacagtctccgatgatggcggtgatgtccgtcgctgaaggggaaggccggttggaagaaactgtatttgagggaagatttggcactgtaaaagaattgcagaaactcggcgcagatattataatagaggataacagggccgatatccacgggctgtaccccctaacaggggcggaggtggctgccagggatttgcgcggcggcgcggcactggtggttgcgggcctggcctcgcagggtgtgacgcggattacagactgcagtcatatcgagcgggggtatgaagatatctgccgggacttaaggagccttggtgctgtgattagaggaatggaatgataagaccagaaaaaagcaaacgaaaaatcgtaatcgggattgcggcggcggttatcgtcctactggcggtaatcttaatgtccatccggattacagagattacagtaacgggtaataaacaggtgaccgccgatgaactgcgcggtctgctgtttaaggataagtgggaccggaatacgatttactgcttttacaaagatcattttaaggaacatgagcagattccgttcgtagaagattataaaatcgtattccagagcccgacaaaagtggaagtcatcgtttacgaaaagagtgttgtcggatacgtttcctatatgggaagctatatgtatttcgataaggacggtattatcgtggagagctccagcaataagcttccgggaatcccatggataacaggactgaagtacggccatatcgccctgcaccagcccctccccgtggaaaataataagattttcgatgaaatcctgaatctgactcagctgctgtcgactcatgagatcacggtggacaggatccagtatgacactcatggcaatgcaagcctgatcctgggtgacattaccgtctatctcggcagcaacgaccagatgagcggaaagatttccgaactgaaggatcagctccccgtgctggccggcctttcggggactctgtatctggacacctatgacgaggctgagacggccacatcgtaccggtttgtaaaaaataaataaaatttccaatcataacttataattttgttgaaaaagtggttgatattttcggtaaaatcaaatattatattagataggtctatagagtaagctgtttatggttaaaggaggatataatcttgttagagattaagataaatgaggcggataatgcggcaagaattctggtaatcggtgtgggcggtgccggaaataacgccgtaaaccgtatgattgatgagagtatcgccggtgtggaattcatcggaattaatacagacaagcaggctcttcagttctgcaaggccccgacagccatgcagatcggagaaaaactgacaaaggggctgggcgcaggcgcgaagcctgagatcggtgagaaagccgctgaggagagttcagaagagctggctcaggccatgaaaggggcggacatggtgttcgtcacctgcggtatgggcggcggaacaggaaccggtgcggctcccgttgttgccaagattgcaaaagatatggggattctgacagtaggcgttgtcacaaagccgttccgctttgaggcaaagacgcgtatgtcgaatgcgattgcaggtatcgagcgcttaaaagagagcgtagataccttaattgtgattcccaatgaccgtctgcttgagattgtggacaggcgtaccaccatgccggatgcgctgaagaaggcggatgaagtccttcagcaggcagtgcagggcattacagacttaatcaatgttccgggtctcatcaacctggatttcgctgatgttcagaccgtcatgacggacaagggcatcgcacatatcggtatcggtaaggcgaagggcgacgagaaggctctcgatgccgtgaagcaggccgtatccagcccgctgttagagaccaccatcgaaggcgcctctcacgttatcatcaatatctccggcgatatcagcctgatcgaggccaatgaagcggccagctacgttcaggagatggcgggagatgacgcgaacatcatcttcggcgccatgtatgacgagacagctcaggacgaagccagcattaccgtgattgccaccggccttgacatgggaagtgaaacccctgtcggcaaggttatgacaagcttcggcggcagtgcatccggctatacgagaccgcagaaaccggcggctcagcctgctcagaaccagaatcctaacccgaatcaggaggcagcggcaaccgcacctgcttacaatccgaattataacccgaattacggcagcccgaactatggaaaccagggatacaatccaaactataacaagccgaattatggcggacaggccggtgcaccaggtgcttcccagggtgccggacagccatacagaccaaccgtaaacagagaagttcagatcaatattccggatttcttaaagaataagagataagatgctacataatggggggtgctgcagatggccttagcaaagcgctgggactatctgcagcactccctgttttaaacggagggaaatgatgtcagaagaaaagaaaacccgtgaggacgactgggagctgtcggaagcgtattataagcgcgaggaaggggagaaagaattatccctggaggattttatcactgaagaggatttacaggcggatggagcgatgcttcagcccaatcacgatgaactgctaaagaagacggcggaggatgtacaccgtgttatggagctgtctctgcagggatacaatatcgagagaatcacggagacgaccggacttgacagccagtatgtgtataatattctggtctgtgctcagggcttccgggaggatgatgagatcgcagtagctcatcttgttctgggataaggcatcaggcgcttttcgatacgacggagaaagagggggtacgagcgatgataaaaaagatgtgtccggtttgtgatctgcctgtaaatgcaggaaattactgtccgcgctgcagaagggttatcaggaagccatatacgcagaatgtagattattacctgaatgagagacatccggtgcatgaagcggagtgtgacttccataatccgtatctggaggcggatcatcacggggaaagcagccgtcctgccggggcggttccgggaaaagatactccgggcagaaatactccaggcagaaatactccaggcggaacggttccgggcaggccggggcagaatccgtcatcaggcgcaggaccctttcatggaagccggacgcagggaacggcggtccagacaggacggccggcacagatgggccaaataaggcagccaggacaggcgccacagcgaagcagcggactgaatggatcctacaggagcccggcaggtaccggaagtgtgaagccggagggcacgaagaatcacacgggtaaaaccgtactgattacggcggtgactggccttgctgcagttgccgtgatagcgtttgtaaatgtagggggccttctgcgcgattccatcaggggatccgtggaaacgacagaggcatatagctacaattatgaatcagactttacagagctgagcgatgaggaggtaatggaggccggtgagcggtgtctgggattctaccattttccggcggatggtgcatatgtgagtgagcagatgctgaaggccgcggagagttccggttttggatacagtcttgattctgatgaattttatacggacaattatctctacgaggacacctcgtattatgaaagcatcagaagcttttatctgacggattccggggctgagacggcggagggcgaatatagttaccagtatgtggatgtgaattatgatactgctaccggggaacttcatgattatatttcccggcttaacagcggcgaagcctctcttgaatttctggaacgttttttgactgcaacggaagagagcagcggaatcgccttggaagacaggaaaacaggcgaaattatggaggaagcccgggatatagcgaagcaggggcagagcagctatatctatgaagggatgttcgccattgaaatttacagatatgaaggagaggatgccatgtatgtctatgtatcctataatgatccggaagcaggatcggaattgtagtaacagtcaagaagatgagtcgtctgaactgttacgaagtgcaggccgtgaacagtatcaaaggaccgtgaaccatgtgatattttcttgacaatccagttaaattatgatatagtattctcaatcgtaagagggagtagcttccagtcccgggactggataagattgcgtcagaacgataaagtaacatttatccgcatacttatgaaatgtgcaagacttttattgataaccgtttggctgtcaataaaagtcttttttgatatcatggaaaagaactccccggtttatagaaaggaaacgcggccgcgttttcagaagtccttacgagagataccagaaacctacagaaagaaaggcggagaaattatggaaacatttgatcccgaaaagaaaccaaagttaaagaaagtgtcaggtctgcttaagaaatcaggagtagccgcagtgctggtgatagcgattcccgtgataggtcttagctctgtttataatattcaggaacaggagcaggcggtgcttacgacgctgggaacggcgaaggcggtagcggagcccggtctgcattttaaaatcccgtttattcagcgggtgcagaaggtaaataccaccattcagggggtggcgatcggatacgacccgtcggataaccagtcggaggaagcggattctctgatgattaccagtgattataattttgtaaacgtggatttcttcgtggagtacaaggtagtggatccggtgaaggccgtctatgcatcgcaggatccgtttaccattttgcagaatatcagcaggagctgcatccgtaccgtaatagggagctatgatgtggactcggtgctgaccaatggaaaaaatgagatacagtccaaggtgaaagaaatgattatgaataagctggagcagcacgatgtggggctttccgttgtcaacgtcacaatccaggattccgagcccccgactgtagaggttatggaggcctttaaggcagtggaaacagccaaacaggggaaggaaaccgcgattaacaatgcgaacaagtaccgcaatgaaaagcttccggaagccacggcgcagacggataagatactgcaggaggcagagtcttcaaaggtgcagcgtgtcaacgaggccaatgcggaggttgcaaaatttaacgccatgtacgtggaatacagcaggaatccggaagtgacgaggaagcgtatgttctacgaggccatggaggatgtactgccgggaatgaaggtgatcatcgacggcaccggcaagacggaaacgattctgcctttagacagctttaccggttccggcacgcagagtacggctgaagaagcagattatggaacagaggaggctgcagaatgaaaaaaacattgaaaaaagtgacgggaactattgcaggactggccgtcgttatagtattattaggttcagttgtagtaacaaaagaaaatgaatataagctgatccggcagtttggccgtgtggaacgggttgtggatacggcaggagttacactgaagcttccgtttattcagacggcggataccctgccgaagcagatccttttgtatgatctggcggcatctgatgtgatcaccatggataagaagactatgctgagtgacagctatgtgctgtggcgcattacagatcctctgaagtttgcccagacgctgaactcttccgtagcgaatgcggagggaagaattgacacggtggtttataactccgttaaaaatgtgatcagcagcatgagccagaatgaggttatcagcggccgggatggggaactgtcccaggctattatgacaaatgttggagacagcatggccgaatatggaattacactgctggccgtggagacgaagcggctggatctgcctgccgataataaggcggcggtttatgaacgcatgatttcggagcgggataagatcgcggccacctatacagcggaggggcaggccgaggcacagaagatcagaaatacaacggaccgagaaattgccatcagcatttctgatgcgaaagcgcaggcagcggcgattacggcggacggtgaggccgaatatatgagaattatggcggaggcgtaccgcgatccgcagaaggccgagttctattcctacaccaggtcgctggaggctgcgcgggcatcgttaaagggagacggcaatacgctgattcttcccgcggattcaccgattgcccggatttttatggggcagtaaagtcggatattacgaaagacaggagaatgatgacatgaagatcaaagacatactgggacagggaaagcctacgctatcctttgaggtgtttcctccaaagacggaagataagtatgaatcggttgagagggcggcggcagagatcgcgaagctgaagccggcctttatgagcgtgacatacggagcaggaggcggtacaagccggtacacggtggacatcgcctccaccctgcatcatgagtaccaggtaacggcgctggcgcacgttacctgcgtctcttccacaagagagaaggtgcacgaggtgttggaggaattaaaggcagcgggaatcgagaatattctggcactgcgcggcgatgttccgaaggatggacctgtggcatcggattaccgctttgcatcggagctgatccgggagatcagggcgtacggtgatttctgcatcggagcggcctgttatccggaaggtcatgtggagtcggtcagcaagaccatcgatatggactatttgaagcagaaggtggaagccggatgtgacttcgtgacgacccagatgttctttgacaataatattttatataattatctgtaccggatccgggagaaagggattaccgtaccggttgtggcgggaatcatgccggtgacgaatgtgaagcagattatccgcagctgtcagttgtcaggaacatatctgccgtcccggtttaaagcgatcgtggaccggttcggcgataatccggcggccatgaagcaggcggggatcgcctatgccacggaacagattatcgatctcatagccaatggagtggacgcgattcacgtgtattccatgaataagccggatgtagcggcaaagattaaagagaatttatcggaaattctttcatgaatgtattaagggaaagctgcaggaagttccggtaaagaagtggagtgatgtgtatggaaatcagccggagagagattcggaggtatctggggtatggcagacaggaagcggatgagaaggtttcgaagctgatagaagaatgtgtggaggagctggaggccgcggtatctccaaaaagtatatacagggtatatcctttttcatttttggcggaggaagaactggattttaccgtgtttcggacagagagccggagcctcagccgtaatttgaaggactgcgaacaggtgattttatttgccgccacccttggcacggaggcggattccctgatccgtaagtactcgaagcttcagatgagcaaggcggtgaccatgcaggcggcggccactgccatgatcgaatcgtactgtgatgagataaacacggagctgaaggagacatttgagaaaaagggactctatctgcggcccaggttcagtcccggatacggcgattttccattggaatgccagagggatattaccgctgtattagagacggctaaaaggatcggtattatgcttacagacagccttttgatgactccctccaaatccgtgacggcggtgatgggggtgagccggaagcctcaccgatgtgaggtgagaggctgtgaattatgttcgaaaacagactgcgcgtacaggagaggataagggatatgacagaattaatggaagaaatcaggaagagaatcgtatttttcgacggcggcacgggaagtctcctgcaggcaaatggactgaagccgggagaactgccggagacgtggaatatccttcatccggagattgtgacaaagctgcattacgattatctggaagcgggagccgacattgtcaagacgaatacttttggcgcaaacgggctgaagtttaacgatgccagtgaatacgggctggatgagattgtgacggcggccatggaaaatgcgaagaaagccgtctcgaaagcaggagataaggggtatattgctctcgatataggccccacaggaaaactgttaaagccgctgggggacttaggcttcgaggaggcctaccgtctgttctccgatgttgttgcaattggtgcgcgtgagggtgctgatctggtactgatagaaaccatgagcgacagctacgaggtgaaggcggccgttctggctgcaaaggaaaactgtaatcttccggtctttgccacgatgatatttgacagtaagggcaagcttttgacgggaggaactgtggaatctacagtcgcgctgctggagggactgggcgtagatgccctgggaattaactgtggtctgggaccggtccagatgaaggggatactggcttatatcatgaaggcggcctcggttccggttatcgtaaatccaaatgcgggacttccaagaagcgagggaggccggaccgtctatgatattgatgcggacgagtttgccgggaccatgagagagatcgtggaaatgggagcctgtgtcgtagggggctgctgcggaacgactccggagcatatccggaaaaccattgcactctgtaaggaccaggcggcgcgaatgccggagaaaaagaaccgtactgtaatttcttcctatgcacaggcagttgagattgataaaaatcctgtcctgatcggcgaacgcatcaatccgaccggaaaatctaagtttaaacaggcgcttcgggaccataatctggaatatatcctgcgggaaggtgtggcacagcaggataacggagcgcacgtgctggatgtgaatgtgggcctgcctgagatcgacgaggcggccatgatggaggaggtggtgatggaactgcagagtatcatcgatctgcccctccagatagacacctctaatattcaggccatggaacgggctctgcgtgtttacaacggtaagcctttgattaactccgtcaacggaaagcaggaagtgatggaggcggtatttcctctggttaagcggtatggcggtgttgttgtcgctctggcgcttgacgaggacggaatcccggagacggcagacgggcgtctgaaggtggctgaaaagatttatgcgaaggcatcggaatatggtattgagagaaaagatattgtgatcgatgcactctgtatgacggtcagctctgacagcaggggcgcaattaccacactggaaacggtcagaagagtgagggatgaactgggcggaaagacaattctgggtgtgtccaatatttccttcgggcttccccagcgtgagatcgtcaacgcggcgtttttcaccatggcgctgcagaatgggctgaatgcagcgattattaatccgaattccgaggccatgatgcgctcgtattacagttttcgggtgctggcggatctggatccgcaatgcagtgagtatatcagcgtttacagcggccaggtggcgacactgggacagacggtgcgccaggggggcggttccggtaaagcggatggaagtggaactgcgatgtctgcttctcttgctgagagtattgagagaggattgaaggagagtgcacatcaggcggttacggagctgctgaagactctggagccccttgtcatcattaatgaggagatgatcccggctttagaccgcgttggaaaaggctttgagaagggcactgtgttccttccgcagcttttgatgagtgcggaagcggccaaggcggcttttgaagtcatcaaggagcagctggcgaagtcaggcagggaagaggagaagaaggggaagatcattctggcgacggtgaagggggatatccatgatatagggaagaatatcgttaaggtgcttctggagaattatggatatgatgtcattgatttagggaaggatgtacctccggagctggtggtggagactgctgtagagcaggcggtgaagctggtgggactcagcgcactgatgacaacaacggttcccagtatggaagagaccatccggcagctgcagaaagcggcgcccggaacaaaggtaatggtgggaggcgccgtgctgacggaggattatgcaaagacgattggagcagacaggtattgcagggatgcgatggcttcggtgaattatgcggagagtgtgttttcggtggaatgattggatggtggcggggggagagtgttagaggtaaaaaacaaaggttactgataacaacgatttgaattatagacaactagcctcttaaaaggaggctgttgtcttttttcttttatctttatatgtggaaaaatagctttatatgagggagagtattcttccaggaaactttacatctacttactgaagtggaatagatatttattatgattggttttgaattgtataaattgacttgtaaaataaaatatagtaaacttatattgtgaaaaataacggctgcttattgctgaattaactgaaatggaggtgatttatgcaaggatactatcgtttttttagccgatgcgatatcactgatggtttcagggaggcaaaaacggtccttttttgtggataagtctttattgattgaagaaataaacaaaaagatttcaacaaaagaaaaatttattacgtaagcagatcccgaagatttgggaaaactatggcgttggaaatgctggcttcttattatataaaagagggggactgcggactctttattcaataatcttaattaaagaatttcacacaaatatagaacatttaaattgccataatgtaatctatattaattttactgattagtttgaggttatattatctggtcaacaaacatgatacgaaggtggaacattttggtgcctatgaagggtaaatgtagaaaaacctctcattttctagcctgtgaattatggtgcgaaccagaagtgatcataaaatccctgggaggttcgcaccgagaatttcgcggttatggagggaagataggagaattggatgaattgagttaatgaaatatatgcaaaatacccatgattattactggttatatggtataatatgtgtgaatttgcagtctctgctagcgatagtggagtggattgaaataaatgctatcagagatatccgcgcctcccggctggtctctgctagcgatagtggaggggattgaaatattcgatgcataaggtatttcgatatacagtcccgtctctgctagcgatagtggagtggattgaaatatgaatccttccggacaaattctgtcgccattgtgtctctgctagcgatagcggagtggattgaaatatgaaactcccttttccagtcagcgccgcaaggagtctctgctagcgatagcggattgaaatagttgggaaaagatactttcctttgcacccccccctctgtctccgctagcgatagcagagtgtaatcgattattacaaaaataaaccgttgagggagtctctgccagcattagaagcttatattaaatttatgaaaaaataattcacagacgttaaaaataaaaagacagaggagacaaggattgaaatacatttttatacatggacttggacaggggccggatagttggaataaaacggtttcctgcatgagagaacaggaagagattcaatgcctgaacgtatttgctttaaaagatggggaagagatttcgtatagcagagtatatgaggatttttcggcgtactgtgagtctataaaaacggagtttgggctttgtggtctttctttgggcgctgtgattgcattaaattatgtggtggagcatccgggaaaggtaacgtcgctggttttgattgggggacagtacgtgatgccgaaggggcttttaagactgcagaatatgatatttcgggtgatgccgaatgggatttttaagaaaatggggttaggcaagagagaactgattcagttgacaaaatctatgatggcgctggatttcaaggaagatttggaaaaagtggattgcaggacactgatcgtgtgtggggagaaggaccgggcaaacagaagagccgcggaaatgatggcagagaagattcctggggcgaatataaagatactggaaggctgtgggcacgaagtgaatgtggaggctccggaaaaactggctgaaagccttgaggcgttttacgaagaaaagcaggatgggaaccttacagaagccgtggtctatgatcaacatgcaggtgatgattgacaacggtataccgacatccgggagcataaaaagtcaggctgaatctgcgatgacaggacggcggtaaggtgttcaaacagtggaagacagcagaaataaggagacaaacaggatgattaatatcaacaatgaggcgctggaagaggcgctttttgtgatcgtctcgattgtggagaggtgcgagaatgcacagaccaaattcagagaaggcacctcccagcatacgcttttgaaaaacagaataagggcgctttatctctcaaaggaactggttgaagcagaacttctgcgcatgggaggtcaattgtctgcggcgagttgtgaagaggcggggaaatgcgaaacaccagacagttgcgtaatactgggagaaggctctttcatggaggaactaaaatcagcggttcctcctattgtttctataatcagtaaatgtgagaaggcacagtcaaaatacgaaaaagggacggcgcagtttcggcggtacgaaaagataatccttgcaatgaaggtctcaaagactttactggaagaccggttggagatgtaagccgtgctggagaaattagcaggaaaggtgaagtcggccaggcgaaagtaaaaaaattacaggttttataaaattatctccgttgaagattgtccctcctcttacttataatagacttaacaggcagtaagaagtttagacataaggaagtaatgaacgctattttcaaacatgcaccatgggacaggcaacagatcaggaggacaaacgagagggaggttttacaatgaagaagagatggattactctgacactaacggcggccgttatggcggggctctgcggctgtggtggaaacagcggcacttccggggcgggggacaccaccggagcgaaaacggagacggagacgactacagcgaaagcggagaccgtggcgcagacggccaaagaggagcagaagggcgagattacgctgcagttctgggaaatgaattacggaagcgacgacgcctacttagagacgtgtgaaaaactgatcgcacagtatgagaacgagaacccgggcgtgaatatcgaggttacggtacagccatgggataattattaccagttgtttttaaccgcggtcagctccaatgcagcaccggacgtggccagtgtggctctggatcttccggacatgtacgccagaatgggagaggccctggaacttaacgatgtagtggcggaatggaaacaggatggaaccattgatgactatggggaagccacaatgaaatcgtttacttacgagggcgatcagatcgctgttccttatatggtgggatacagagggatcttttaccgcagcgattttttgaaggagtgcggaatcgaaaaggttccggaaacctgggatgaactgctggcggcgtgtgagaagatcaaagaggtccgcccggatctgactcctctggatttcgcgggagcagacatggggctgtggcactattttatgtgcttcgccatgagcaatgacgcgggaatcgtgaaggaggacggcacgccgggaagtacggatgacagatataaggcggccatcgatttatttaagacgttcaaggaaaaaggctatgtggctgacggtgtcctgggacataaatcagcggatgcggagaagctgtattacagcggtaagtccgtgttctggtttaccagcttcccggcttccatcttcgattatccggagattctggaaaataccgaggtttacagtgcatttaaggggccggacggaactgcggtcagaacctccagtttcagcgatgctctgatggcattctcacagacaaagtacccggaggaagcgaagaagtttgtaaaatggtgggcagagaacagcagcgctttatataccgaaggcggatgctgggcgtatccggcgaagaaatccttcttcagcggcgagacctttaacaacaaggttgcccagggcgtgttaaataagatcgtgccgaccgcagtaccgtgtacctggccgatcgagaacattttcccgggattctctcaggtaaatggtgagcagacgatgaattacagcgcgcaggaggcgcttaacggtaaggtggataccggcgagatcgccagaatccaggcagaaaagatccaggaggcaatcgacatcgcaacagaagagtagtgaccagagaggtccggcttttataaaaggccggaccttcattgtgggtcggatagacccagttgagtgcgcgaagcgcgcgaaatagaaaccacccgctatgcgggtgcgcggtgttggttataccaaaaatcactcagcctgatataatagaggtgtccaagccactattaaaaaggagagtgattttatggcgaagaaagccaatgaattagcgcatacaaagtggatgtgcaagtatcatatcgtcttcacccctaagtatagacgaaaagtgatctataatcaatataaagaagacctgagagatatcataaaacaattatgtaattataagggtgttcagatactggaggggaaattaatgccggatcatgtgcatatcctggtgagtatcccacccaagataagcgtatccagttttatgggctatttgaaaggaaagtcagcattaatgatgtttgaccgtcatgccaacttaaagtacaagttcgggaatcgtcatttctggtcagaaggatactacgtaagcacagtgggattaaacgaagacaccataaagaagtatatacaagatcaggagaaggcagatatcatgctggacaaattgagtgtgaaagaatatgaagacccctttaggggttagtcggtattcagatagccccttgaaggggcggcaacagaggtaaaagcacaaagtggcttgaacgaagtgaaagccagcgccttgagacgctggcctagtaacaaaggcttatagccgaagcgcgagccacccgttagacgggtggcagcgactaaaaaaggagggactgctgatggagaaaaaccggagaaggtttggtcttaaaatgctggtcatgccgacgatcattctgctgctggtcagcttttatccgctgtttaacagtatttatttaagtgttaccaatacgaatatcttaaagaagggacagacggtccggtttacgggcgctgccaattttatcaagctgttttcggacaggaccatggggccgtccctggtgtattccctggagtatgcgtttatctgtgtggccgccagctatgtgctgggactctttctggctgttctgctgaatcagaagatcaagggaagagcgctgtttcgcggcctgattctgattccatgggcgataccgaccgtagtggctacggcgaactggctgtggatcttaaatgaccagtcgggaatcgtgaacgtggttctgcagaggctgcatctgacggatggcccgattctgttctttgcagatcagaggatggcgcggattacatgcatcgtagtgggaacgtggaaatcgtatccgtttatgtgtatgtcgctgctggcaggtctccagggcgttccggaggatgtctacgaatcggccaggatggacggggcaacaggaattaagacgtttttctatatcacactgccgatgatccgaaacgtgagcatggtggtcgtgaccctgatgtttatctggggctttaacaatttcgatattatctatcttctgactcaggggggaccgttggaggcgacttttacgcttccgatctacacatacaataccgcgttttaccgggggcagatggggtatgcatccgctatttccatgatgactcttgtgattcttctgttcttctgcgcagtatacatgaaaatgcagaagggaaaggatgacgtatgaaaaataaaaaggggatcgtttatgcacttctgatctttttctgcgcggctgccaatttaccggttctgtccatgattggaactgcgttaaaaccgaggtatgagacgctgtcaaccgtttcgctgttcacgctgcatcccacgctggataattttattcatgtgctcaccaggacctcttttgcacagtctctcgtcaacacgattttcgtggcgctgatcgtgacggtgctgtgtgtggcattttccacgatggccggtttcggactgtcacggtgccgcggtatcctttttgacggatatacgatgttcctcattatccttcagatgctgccggccatgctgattatgattccgctgtatgtgacgctcagccggtttcatctggtggatacccacttcagccttatacttatctatacggccatcaatctgccgttcggtatctggaccctgaaagggtttttcgacgatattccgacggaactggacgaggcggccatgatcgacggatgcagccgctttcaggcatattggaggatcattcttcctttttctctgcctggagtggcatcggtgggagtgtttactctgatgaatgtttggaatgaatatacgatcgccagtatttttatccaggataaaaatctgcggacgctgtctgtgggtatccggcagtttatgatgcagaatacgacagactgggcttccatgagcgcggcggcaaccatcgcggttcttccggcattcgtcatgattatatttgcacagaagtatttggtaggcggattgacttcaggttccgtgaaaggatgagcagatgagagaaagtgtactgattttgtgccgcaatgaccgggaaacgatcctctatgcggcggaggaactgaaacgttacttaagcctggccggcgtgtccgtctggacctcggtgggggaggcgcacagccagtatatgaagacgctggagctggcggtggcaccggaggagtttcgggtaaaggaagggcagtgtatggagcgtccctctcactctgtctggcagaatgcagacgcctacgccattaccgtaacagatcttgggggaaccatcaggggctccaataaccgcagtgtgctgctgggggcctaccgatatttaaaagagctgggctttgcatttctgaggccggaccgggagggggaacggatcccggcagcggtggggccccacacggtaaagatcagagaagaggcttccagccggtaccgcggaatctgtatagaaggcgccgtgtcgtttgaaaatattatgcgctttgtgacctggcttccgaaggctggctttaatacgtattttacacagtttaagattccctatgagttttttaagacgtggtacctccataccaataatccgtatcacggaaaggagccggtgccctcggaagaggaggtggacgcgtttgtaaaagaaattctcgtcccccatatgaagaaactggggctgatctggcaggcgggcggccatggctttacgacgggagtggcaggactgcccggtacgggatgggatcctctggcggaggaaaaggtgccggaggagagcagggagtatctggcgatgattgacgggaagaggggactgtttcatggtattcctttaaataccagcctgtgctgttccaacccgctggtgagagaattgctggttcgtgagatcctggattacattcatgcaaacccgcagctggacatggttcatgtgtggcttgccgatgacggaaacaacagctgtgaatgcggggcatgcgccgcgaaacggccttctgactggtatattgagatattaaatcaggtggatgaggcactttcaaaggaaggcagtccagttaaggtggtatttctggcgtattttgatctgttgtggccgcctgtcagcgcgaagcttttgaatccggagcgatttgtgttcatgtttgcgccgattacccggtcctaccggacgccgcttccggtggaagagacggcgctcattcctccgtataagcggaatcaatgcagatttccggtaaatgcgggggaaaatatgcattactgcagcgcctggaaacagttttttccgggggacagctttctgtatgattatcactacatgtggaatcagttccgggactggggcgattacggatcggcagaaattctgtggaaagacctggtgaacctggaagaggcgggctttgacgggtatgtaagctgtcagcagaccagagtatttgcgcctgcgggctttggaatgtacgtaatggctgaaacgctctggaacaggagccgtacctttgaaacgctggagcgggagtatttccagatggtctacggtgatcatgcggagacggtgctttcctactgtaaggaactctctgcactgtcgtacatggaacagccggagaacgatgatccgggagtgtgcgcgggtgctgcaaaaaagctgaaagcggcggcagatttaatcagaacataccggcctctttttgagaagaattttggggatgagaagatacaggatcatacggcctggaaatatctgttatattccggcagggctgccgaaatgtacataagtatgttaaaatacaggagacagggatcagcggatcgggtttcggaggagtaccggaagttgaaagagtatctgggcaggacggaggaagaatggcaggaaggttttgacgtctactggtttataaaggacagagacaaaaaattcctgccctctgatacgtaagaaaagggagggatcgtgcttgggggacaggagaaagcgaattcccgcgcttctcaggagaattggtttgaagagaaggctgtttattggctttgtgatcgtttcgcttctgccgatggcggtgctgggggtcattatgggcgtcaggctttaccatacgattatggacaattacgaggagcagtccatacaggcgctggggaccatccagtaccggatcggaatcgtgaccggagccaaggaggagagaatcaatgcgtttgcctccgacgccgatgtggtcaagagcgtgcgaaagcttaatatggatatcagccttctcgaccggactgcactgacgagagacctacagggcaagctgttagcggaattaagccagattaagggcggcgtgcgtgcggaaatcctggaccggaacggagcgtacgtcacggggattttcgacgaccgctatacagcgctctccggcgaggcgagagcccgggcggcggagagtccggaccggctgcatctgtggcacggaacggatcaggagggggaagagattatcgttttctccaggcagattattaattattttaatggaaggaccacgggatgggtgcttctctatgtggggacggatgagctgaaggaagagatgaagacggtgcagaccgacgcggttattgctgtttacgatgaggagggcggcctgatctgttccggaacaggaaatgggaatattgccgatattgcggatgaagatttaaatgaggctggcttccgggtatcgggctaccgggcttctgaggatatgtggaaggcggactggaagctggaatcaggacggtatcaggtgcttttccagaatatggccggtaccggatgggagatcgccatttttaaggattaccatgaactggtacggtcatttgccggaattgggatactggctgccgttatctgtctggtgagtatcggcattattctctatctgtcgcttttgattaccaggaccgtggcggaaccggtgcagaacatcgcggagagcatgaagattttcagccagggaaacttaagcgtccgggtggcggacgacgcagcagatgagatcgggatgctgggagatgagtttaattccatgagcaataacatcgagcgtctgactcacgaggtatatgaggcccgcatcaaggagaaggaggcgggcttaagagccctcgaggcgcagatcaatccccatttcctgtacaataccctcgatatgatcaactggatgtcataccgctcatccaatcaggatatctgtaagattgtgaagtctctttctgacttttttaagctgagcctgaatcatgggaaggagctttacacagtgggcgacgaggtgcgccatatacagagctatgtcaccattgaacagtataagaaggcggaaattgattttgagattcatgtggaggaggaattaaagccgtgcttctgcccgaagctgatcgtacagccgctggtggaaaacgccatccttcacggaattgagccgaaacgggggcagggaacgatcctcatttcctttgtccgcagggaaaacgacatcgtgatcactgtggaagacgacggcgtggggctgtgtgcaaagcagagagaaggcgtccgctatcatcacggtggatatgggatacagaatatcaatgaacggctcaccatgctttacggaaagaagtaccatgtgaccgtggaagagagaaaggaaggcggcgtgatttccagtgtcgtcattccactgatcggattggaaggtttggacgatgtatctgatgattgtagaggatgaaaaatttattcgtgacggtattttatacctcttatccgaggttccgggtattacggaaatcgacacggcctgcgacggggaggaggcctggagcgtgataacggattcgaggcggtttccggatatcgttctgacagatatccgcatgcccggtatggatggactggaactgagcggtaagatccgggagcattccgctgcctccaagatcatatttatcagcggatatgaagattttgcctatgcgaaaaaggccatatcccttggagccagcgggtatgtgacgaagccggtcgcccaggatgagctgctggaactgattaaccgtgtgatggtacagatcagaaaggaagagcagttcgaccggcagcaggagatatcgtgtttccacgaaaatcaaacagatgcgctgctgggagatatcttaagccagatgagggataacccgggcggtgtgtctttaaaggcgctgtctgagagctggggtgtgtccccatcctatatcagcattctctttaaggataagacgggccataactttaaggattacctgctggactgcaggatgaagcgggcaaaggagcttttggcagagggaagcccggcagccgagatctgcgagaacttagggtacagcgattacgactatttcagcaaaagctataagaagtattacggcgaatcgccggcggaatacaggaagaggataaatctatagcctggcccgccacaggggccatttgaccttgcaacagacagacatgttgtgctataatggggaaagcctaatacattggaggtactacaacatgaaaaagattattttgacgggagaccggccaacgggtaaacttcatatcggccattacgtgggctccttaaagcgcagggtggagctgcagaattccggtgagtttgatgagatatttatcatgatcgctgacgcgcaggctttgaccgataatgcggacaacccggagaaggtgcgtcagaatattattgaagtggctctggattatctgtcctgcggccttgacccggcaaaatcgaccctgtttatccagtcacagatcccggaactgacggagctgtccttttattatatgaatctggtcaccgttgccaggcttcagagaaatccaactgtgaagtctgagatcgccatgaggaattttgaagccagcattccggttggtttctttacgtatccgatcagtcaggcggcggacatcacagcgtttaaggcgactaccgtgccggtaggcgaggatcaggagccgatgatcgaacagacgagagagattgtcagaaagtttaattcggtatatggagaggcattggtggagcctgatattctgcttcccgacaataaggcctgcttaaggcttccgggtactgacggaaaggcgaagatgagcaagtctcttggcaactgtatctatctgtcggattccgaggcagatgtgaagaagaaggttatgagcatgtacaccgatccgaaccatatccaggtttccgaccctggtcagattgagggcaatacggtatttacgtatctggatgccttctgcagggatgatgcgtttgaaaagtatcttccggattataagaatctggatgagctgaaggatcactacagacgcggcggactgggcgacgtgaaggtgaagaagttcttaaacagcgttcttcaggaggaactggctcccatccgtgccagaagaaaagagtatgaggccaatattccttacgtatatcagattctgaaggaaggcagtgagaaggcggaacgcgtggcggcggatacgctggcaggcgtgaaggcagccatgaagatcaactattttgatgatatggaactgattgccgcacaggcagagaagtataagaatcaggagtcttaattgggacagagttcaaccgttttataaaatgcggcagcgtttttataaggcggttgaattattttaggagagaaaggaagtaagacaatgaaagatgtgatatcacttcgtgagatcgtggactgtgacgcgtttttgaaggagaggggcttaaacttccggatccatctgcgggacgcctgcggaaagcagtcctgctggatcgagccgcttggcgagtgcggttgcgacggacagtatgaggagctgtatgcggctttggaggagttctttggaaagctgcggtacaaactggagtacagcgatgatgagctgaacttctggctgtccggcgaataggagcggcgggccatgaaatcacgttataagggaattgtgtttatcgtctgttcggcgttctgttttgctctgatgaatctgtttgtcaggctgtcaggagatttaccgtctgtccagaaaagctttttccggaacctggtggcatttttctttgcactcattttgatgaaacgggatcatgtgggcttttcgggaaagaaagagaatctatggccgctgtttctgcgctctgcgttcggcactatcggaattctctgtaatttttacgcagtggatcatctggtgctggcggatgcgtccatgctgaacaagatgtcgccgttttttgccattctgttcagtttcctgatcttaaaggagaaggtaaagccggttcaggcggttattgtggcaggtgcatttgcagggagcctctttatcatcaagccgtctcccctcaatatggaactggttccggcagtgatcggtctgttgggaggtatgagcgcgggagccgcctatacctttgtgcggtcactgggaatccgcggagagaagggtccgtttatcgtctgctttttctccggattctcctgcctggcgacgcttccatatcttctggtgcgtttccatgggatgacgctggagcagctggggtatctgctgttggcgggccttgcggccgccggcggacagtttgcgattactgcggcttactgccatgctccggccagagagatctccgtctacgattactctcagattatcttttccgctgtactgggctttgttatcttcggccaggtgccggaccggttcagtgtgctggggtatgtgatcatctgcgcgatggcggtggtgatgtttctttataataacagaggaacacagaacgagtgagggaacggaagcaggactatcacaacttcttacaatagaaactagatccaaatttcaatactgaaaaatgataataataatcaatactgtttattgactttttcaactttcgggtgttataatataaccagaagttagataagactaacttataattttcctgtaaatgaaccatattatttaaggataaacaactgaaaggagatagaaagactatgtcattaattggaaaagaaatcggtgagtttaaagtacagagttttgtaaataatgaatttaaagaagtaacgaaggaggatgttctgggaaagtgggcagtatttttcttctatcctgcggactttacctttgtgtgcccgacggagcttgaggatctcgcggataagtatgaggattttaagaagattggctgcgagatttacagtgtctcctgcgatacgcatttcgtgcataaagcatggcatgatgtgtcaaagaccattcagaagattcagtatccgatgctggcggatccgaccggagcactggcccgggacttcgacgtcatgattgagtcggatggcctggcagagcgaggttcctttattgtcaatccggaggggaagatcgtggcttacgaagtcatcgccggaaatgtgggcagaaatgctgaggagcttttccgaagagtacaggcttcccagttcgtggcggaacacggcgacgaggtttgcccggcaaagtggaaaccaggtgaagagacgttaaagccaagcctgaacctggtaggacttttgtaatatgagagggcagtacgacgtcatcgtcgtgggagcggggccggccggattatcggccgccctctacgcggcgagggcaaaataccgggtcctcgtcctggaaaaggagaaaatgggagggcagatcaccattacatcggagattgtcaactatcccggcgtggagaagacggacggcactgagctgacggaacagatgagaagacaggcggaagcctttggcgcggaatttgccatggctgaggttacgggaattgatctggacggagatatcaggacggtgaaaactgacaaaggagagtaccgtgctccgggcattgttctggcagtgggtgccaatcccagaaagctgggctttgtgggagaacaggaataccagggacgcggtgtcgcctactgtgccacctgtgacggggaatttttcacgggaatggatgtcttcgtcatcggcggcggatttgcggcggcggaagaggctgtatttctgacaaagtacgccaaaaaagttacgatcatcgtcagggaggaagactttacctgcgcgaaggcggtggcagacaaggcgaaaaaccatgagaagatcgaggtacactacgagacggagattgtggaggcagctggagacggactgcttcggcgcgcgcgttttaaagacaatgcatccggcggggagtggacctacgaagcaccggaaggaacctccttcgggatttttgtatttgccggatacgtgccggatacgaaatggctggaaggtttcgtggagctggacggacagggatacatcattacggaccggaaccagaagacgagtgtggacggcatctatgcggccggagatgtctgcgtaaagaacctgcgccaggtggtgactgctgtctcagacggagccgtggctgccacttccctggagcggtacgtttcggaaacatatgagaaaccggaactggcccaatggaaagcgcagatggaagaggaacggacgaaggctgtagaaaactccggcgcttcgaagcacaccggggccgcagagaattccggcaccctggaagcttccgacggaggaacggagggggtgtttataaccggggaaatgaaatctcagcttgcggacttattttccaggcttcagaatagaatagtggttgagggtgtgctcgacggcagtccaatggcggcggagatggaacattttcttgatgaactcggtgacagttcggatatggtggaatgcagataccgccgtgaatcggataagatcaaagaggatgaagagtatccggtgctgcgtattttaacggagaacgggaatgagaccgggatccggttctatgcggttccgggaggccatgaattcaattcctttgtacttgcaatctataatgcgggcggtccgggacagccgattacggatgaagagagggagcggatcgggaagctgaagggaccggtgaacataaagattgccgtatccctgtcctgtaccatgtgtccggccacggttatggcggcgggcagaatcgccgcggaacgtgacggtgtggaagcatgggccttcgatctggcccattatccggaaatgaaagaaaagtatcagattatgagtgtgccgtgtacgatcatcaatgacaggacggtggtattcggcagaaaaacagtggatgatctgctggcggttctggaggaatcctgaaaggaacaggcagatgaaaggagaacgaatatgaactatctggaaatagaaaaggttatcggacgggaaatcattgactcaagaggaaatcctactgtggaagcagaggtatggctcgccgacggaaccatcggaagaggagcggcgcccagcggtgcatctaccggtgaatttgaggctctggagctgagagataacgataagaagcggtttggcggaaaaggcgtcaggaaggctgttgaaaatatcaatacggtcatttccggtgtattgacaggtatggatgcgtcggatatttacgcagtcgatcatgccatgattcaggcggacggaacgaaggacaaatcaaagctgggagcaaacagtattcttgcggtgtccatcgcctgcgcacgggccgcctccatttccatgggaatcccgctgtaccgtttcctggggggaatctccggaaacagacttccggtaccgatgatgaatatcttaaacggcggcgcacatgcggccaacactgttgacgtacaggaattcatgattatgccggttggcgctccgacattccgcgagggactccggtggtgtaccgaggttttccactgccttgcgtctattttaaaggaaaaaggcctggcgacctctgtcggtgatgagggcggattcgctccggatttaggcagtgatgaggaagccattgagctgatcttagaggcggtaaagcgcgccggatacgaaccgggacacgatttcgtcctcgccatggacgcggcttccagcgagtggaagggcggaaagaagggagaatacgtacttccgaagtgcaaaaagcattttacctctgaagaactgatcgggcactggaaacagctctgtgagaagtatccgatctggtctatcgaggatgctctcgacgaggaggactgggaaggctggaagaagctgacggcttctcttggcagcaaagtgcagctggtcggcgacgacctcttcgtaaccaatacggagagactgaagaagggaatcgattccggatgcggcaattctatcctgattaagttaaatcagatcggttccgtgtccgagacgctggaggccatcaaaatggcccataaggcaggctatacggccatcgcttcccaccgttcaggagagacggaggacaccaccattgcagaccttgcggtggctcttaatacgtgccagattaagacgggggctccgagccgaagcgagcgcgtggcgaagtataaccagcttctgaggatcgaagaggaactgggggagacagctgtttatccaggaagaaatgcattctgtgttaaacggtaaaacacattttagaagaaaatagcagcgttgatcataggaaattcgaacgaatgaaaaagttgattttggcggcagagagagacttggcagctctttctgccgctgtttttgtaatttgatcgttttgacggttacagagaggaccgggtccagaattcttccatatatcttttggcagccggagcatccaactccagtttttcaatcagttttctgcgggtatcatcgtaggaaagtccgatttcccggcaaacggaaatcagtgcaagggcacccttttcaattcctttttcaatccccttttcaatgcctatttcaattccatcattcaccagcatctggcctaatcgtgtcatgaacatgacctcctttaccttgtctaaatcgtcgtttgacagaaacttgtttgcgaatgtgtacagtaccgcctgcatttttaccaggtccggccggggagggtgccggattcggtactcaggcggtttgccgtaagaatccggtccttctgatccatggtacctgacatcagtgtggtgagcagaaggggaacaagatcagaacggttcagttcttccccgaaaaactgcatggagctctttaagaccaaatcttccgccggaaagttgtccgggatgtctttcgagccgtctgcattgttcgtattgctcatacagcctccattccagctatataagaacctatctccattataatatttttctgtaaaacagacaatagccctgcttatttttctggtattatttacatgaaattctggtgatgtgggaattctttcgtccgaacggacagagaatgcctgatgaaactggcagaacggaatgcggacagaagccggattcctgtggcgatagcttcctataaaggctatcatcggttttgtaatagcagtataacatgggcaggccggacgggacaaggtttttttattgagtaatagaaaattccggcagaaatagtgaagtgacatttgccgcaggctatggtagaatgaaaggaaaattggttgaaatcaggagttggagacactatggtctggatttatcacgctttttttgaaccggggacaggcggaaacaagagggagaccgagcacgaacaggggctttggcttctgcggagagctctgagagaacggtatgggataggatgcggggaaggacggatgccggaactggttgagggagcgcatggaaagccatacttaaaagagtatccgctgattcactttaatatcagccactgcatggggcttgccgtgcttgccatcggggattgcaccgtggggattgacgcggagtgcgtgcggccgtaccgggagccgctcttaaaaagagtactttctgatgccgagctccggcagatgaaggaggcgggagaatcggagcgggaggagttgtttttccggttctggactctgaaggaaagctatgtgaaggcggtaggatgcgggattaccgtgcccttacaggatatatcctttcagattggtaaaaatggggaaatcgcctgtgaaaagaccggctggagtttccggcagtggaagctggcagagaagtatattgtatcggcctgtgtagcgggggaaggggaaattcgtctggcagaacaggaggaacagccttgagtggtgagaaaaaggatttgcgttacagcagaacggacaggcttttgcaggaggcgtttttggaacttctgaaggtaaaatcagtcgaccggattacgatcagggatttgacggaacgggcggggataaaccgctgtacgttctaccaccattaccaggatatctacgatctgctggagcagatcgaggatggagtcatggaacacgtgctggagatgatgcgggggtttcatcccaaccgggaagaggatgtcagccgccggtattttgaatgcttctgccagtacatttatgagaacaggactgtgtactgtgtgctgaccaatggccaggagagccggtttatcaaaaagctgctgaaaatgatctcagagtacatggcgggattatccgggaaggagaatgacggggacaagctgagccgcgaatatgcagtagcctattctatcggaggtgtggtgggtgtcctgcataaatggatgaaagaggggtttgaaagcccgcccgagatggtagccggttttatcagcaatgtatttttgaatggaatgaaggatattttgtgataactgatgaggtacgttctggctgaagcattatggcagaggcggccaaaaatttagaaagaagcggtttggggagtatgattcctcaaaccgcttctttctcatatctgcaattgcaaacaatgttcagcgagctgcctttatgatacggcaacacgttcgatataacggaacatgtcgtccacggttttgatttcaagcagatcgctgatgtccgtctcaatctgaaagtgttcttcaatatctccaatcattgcgataaaatccagagagtcaaatcctaagtcttcaacgaagcgggaatctctggtgatggattccgggctgacatccacgtactgggtgacgagttcctttaactgcttatacatattcattcctcccttgattctcctccggtaactgtccggtggtttgaatttgagtccaagtttaagcagatttccatcaaagatcaagcaacagatcggaaaagttgttgcttaagcaacagatattgaaaagtgttgtttttattggtcaattacctctgaattaatgcccataatattcagctgtccatcctcagttaaagaaaagaagagaccgggcgatccggattcgctgccgatgaagatgccggcctgtgacggcgtcagctcttccggatccactccggcgacggcctgaagcatggcgtctgtaaagatatcgtccttctgcgatatcagtgctgcggcgtccgcaacatcctgtccctccgtgttggcttctgtcgtaacgtaaacgggataggcgcaaagcctggacagcgcttcgatatcacgctccgagaaaaccttctggatctgcccggcaaagcctttatagtctgattcttccagggaggcggccctgcctgcggttacttcggggacggcttccgcctggagggagaggtctgcctccgttccgttaagcccgttttgagcttcgtcagtctccagcacaacggcagtactcccgagctggagcgggtcttctttgggctgacagccggtcaggcacagcatggccgcggctgtaactgcggcggccagcaaacatttttttatcatgacagcagttctcctttgtaatgacagattcgatcagactggctgatcggttactcccattttaaggtctgtccataccgatgtcaaccgaaggttttctggctgtctgttttaacgtgatccggctctctgagagtatcagcccggccagagtcagtacaattccgcatgcggactgccaggtaataacctcgtgcagaaagattaaggaagtaatcaccgtgatgacgggaacggcatagatgtagacgcttgtctttacggagcccagggctctgactgcaaaattccaggttacgaagcagagagcggaagcgccgaatcccaggaagaggatgttgagtgcgttctgcattaccataaaacgcgccggtgcaatctggaagggcaggaaaaacagcgccggtaccataaagataagaccgtaaaaaaaggttctgcgggtgctctcaatggttccgtacccatagcttccgatttttttcgtaagaatggagtaggccgcccaggtgattgccgccgcaagcgccagcaaatctcctttgggactcaactggacgccggtacccttctgaaagcttaagagggagattcccagcatggccgccgtgaagccggttaagaaacggcggcccggcttttcccccttcatgaacagccagtcgaacaggctggtgaagaacggggccacggagatgataatgcttacgttggctgcctgggtcagagtcagcgcgaaattttccatcaggaaatagagcgtgacgccgcagaggccggctgccgcgaagagcagttctttttttatatccttcgtgtggaggaggcgcggggcggcgatccacagcgccgcgtatccgataaaaaagcggaaaaacaggatttccagcggtgtaaaggatacgagcagaaccttggttgaaatgaaggtggttccccagatgaagatagtgacggctgccgcgagatggcccgccatgtttggcttttctgacatgttttattcctccgtaccggcggctgtatccctgccggattctgtaaatattttctgatactgtttcggagtcagtcctgtgaaatccttaaagaaacgggtgaaatgactctgatcggtaaaaccggctctggcggccgcatcgatgggaggtaccgcctgctccagcagcttctttgcctcttccaagcgaatagactggagatagcggtacggggatactcccgtctgctttgtaaaggtgtggagcagccacgatttgcttaaatgaatctgatcggtcagctcctccagcgtgatattttcggaatagtgctcttttaaataatcacaggtatcggcgatggcactgtccaaaaagactccgttatgctcttcgtaaggagcgctgtgctcttttaaaatctgttccagaaggaaaaagaacgcttcctctttttcaaaaggagacgcgccggttacgatggcattgtagacatcggccagtgacgtggtgatatcgctgtgatagacgacattgacggtgaactgcgggataaattcccgtccggtaatgtcggcggcagcccttttcatgaccggcacgggaatgtttaacgcccggtagtccagcagttccccgttcatgggagaacagaagtggttgtctttcgggttaaagagaatcaaatctcctttcgacagatcgtactcggatccgcggcaccacagatggcggcagccgccttctatgaagccgacgacgtagcattcatgaaaatgattgggaaatttctgtacgatgccgcttaactgataggcttcgataccgagacagctgtcgtagaatatatggcgttgttcctgagatgtagtcatggcatactcctttcaaacttttttgattttatcacaattaagtgaaaaagtcttgtatgatatggcatatgaaggcccggaaagagcgtcagagcaaaaaagggctgtgacacgccgtactggccgtgagcagtaacgggaagtttgcgtttttgcttataaaataccgaaaactggaaagaattttttaggaagaccgcgattgaggacttcactgagagtaaacggcaatatggaggaaccgcatatgaagaatatgacagataattttatgatttcttttttacagcgttttgatgagcatccctttgatgtgaagatccatggaaaaacccatcacattggcagcggaaatccggcttttgtggttgatttaaaagaggatattgaggggaaagaactgctgacgagtacttccctggcactgggggaagcctacatgaaggggaacctggaggtggaaggggacttattcgaggccctggattcgtttctgggacagatggaccgtttctccaccgaccagtccaaattaaagaagctgatgtttacctcccagtctaagaagaatcaggagaaggaggtcacctcccattatgatatcggcaatgacttttacagtctgtggctggatgagaccatgagctattcctgcggttactttaaacatgagaccgacaccctgtatgaggcacagtgcaataaagtggagagaatcctggaaaaactctgtttaaagaaggacatgacgctgctggatatcggatgcggctggggatatttgctgatccgggccgcaaaggagtacggagtaaagggactgggaattaccttaagccatgaacagcagaaggaatttgaagagcggatcgaaaaagagggattgacgggacagattgaggtagcgcggatggattaccgcgaactggagaagagcggcaggcagtttgaccgggtggtcagtgtcgggatgctggagcacgtgggacggaccaattacgaactgttcgtaagaaatgtgaattctgtgctgaagccgggcggacttctcctgcttcattatatcagtgctctgaaagagtatccgggggacccgtggatcagaaaatacatctttccgggcggtatggtgccgagccttcgggaaatgattcatttattcggagagtaccggttctatactctggatgtggaaagcttaagacgccactactataagactctgcgctgctgggaacgtaatttcagcggccacaggcaggaggtggaggcaaacatgggaaccgagtttgcgagaatgtgggaactctatttgagctcctgtgcggctacctttcacaacgggattattgacctgcatcagatcctggcctcgaaaggcgtgaacaacgatctgcccatgacgagatggtattaactggaaatgaggaattatctcaaaaaagtggttgcatttttagttagtatatgctaatatatattcagttagtaaacactaactacatgtgaatattctatacaatatatgaaccctctgggttttccttcattgacccgtgaaggaatcatgactcctatgagaaccgtccctgttaccgcatgacagaggcggtttttcatgtgtattgctatacagaggaaataatgatagaatggtaaaacagtatgagaaaagcagtatgagaagagcagaaatgaaagaatgacaggttttccagcaggatgaaccggaaaggttggaatacagatgaaaaaggtacttatgatgattcaggaatcatgtccttactgccgtcaggcgctgcgcatgatggatgagctgaaggaggagcggccggagtataaggcggttgaggtgaaaattgtggatgagaacagggagaaggcgcttgcagattccctggactactggtatgtaccgacctattttgtggacggggtaaaggtgcacgagggtgtgcctactatggaaaaggtgcggaaggtttatgagaaagcgcttaactgacagaaaggtacataaattgtgacatcatatgagtaacgggaagaaaaactggctgataatcctgatttatgcgggattgattgcgatgtgtcttggcatcgtgtggtttgtgggaaaactctcctcgccgacggaaactggcagagagagcggaacctggacgacaggaccgcagaccgaagagacgcaggaggaacgtaaagagggggagacggagagtgtgaaggcgacgccatccgaggcggaaacgcaggaggaaggcaggcagcagggggaaagcgggaactggtacagcggccgtactgagacaggacggatggagacggaagaagaactgccggtggaagaataccggccgccaaccattgtaacagtttctgacatccattattttccatcgtccatgaccgattacggcgaggcgtttgacgagctggtgaaacgggacgacggaaagctgattccctatatctctcagctgatggatgtgtttacggaagagatgacggagcttatgcccgacgcggtggttctgagcggtgatttgacgctaaacggcgagaagggggcccatgaggcgcttgccgggaagctgaaggtacttgcagaccagggggtgcgggttctcgtaattccgggaaaccacgacatcaataatccccatgccgcctcctatttcggagaggagaggacggctgccgagacggtcaatgcagagggatttctggatatttaccatgagttcggatatgatcaggcgatcagcagagatgagacttccttgagctatatctgccggctggatgagaagaactggctgatgatgctggattccgctcagtatgaccccgtaaacctggtgggaggaaggatacgaagcactacggtcaaatggatggaggaacagctggaggcagcgaaggaactggggattacggtaatccccattgcgcatcacaatctcctgaaggaaagtattctctatccggtggactgtactctggaaaacagcggggaagtgatccggctgctggaacgataccgtgtgccggtctttatcagcggccatctgcatctgcagcggacgaagaaatacaagcccgagccgggagaaccggaggacgtctatcatatcagtgagatcgtggcggactcctttgccattccgccctgtcagtacggaatcctgtcatggggagacggcggggaactccgctatgcgacgaaggaagcagatatggagcgttatgcggcggagcacggcctgacagatgaaaacctgttaaactttaaggaatacggaacggatttcctggtgggagtgatcagtcagcagatctatcagaagatgagcagcctgccggaggaacacatgcgcaagatggcggagctgtacggccagctgaaccgggattactgtgcaggaacccccattgatgtgaaagagataaagtctgaggaagcattccgcttatgggagaggaatcttccggacagccggatgtttgaggagatcgatgatattctgcgcgacaccggaaaggatcacaatacgtgggagttaccgggagagtggtaaaaacttcctttacaaattatttcttatcgtgctataatgatgaaataaaattacatgcgtgacagaaacggaggaagaggagccatgcaggatcatatcaacgtttcaggagtcctctgttcttcttacgataccttttttgaggcggaaaagaagattgcagattatattctggagcataagagtgaaatcatcgatatgactgtcgcagagctggcattggcaagcggtaccagtgacgcgacggtatcgcgtttttgcagacggtgcggatttaacggttttcatcatttaaagattactctggcgaaggaggtggcggaggaacgcgggaattccgtggaggtatccaacgatatcagccgcgaaaatatcgcacagtcccttcagaacatcctggccaacaaggtggcggagctgacacagacagtgtccatgatggacccggttcagctcggaaagattctggacctgattgaacatgcccgtacggtgcagctggtggccgttgggaatacgataccggttgccttagacggtgcctttaagttgaatcaactggggatcaatgcggtgtcggggacgatctgggaggcacagatggcgtttacctgcaatctgggaccggaggatgtggtgatcatcatatccaattccggtttctccaaacgtctgatgacgctcaccgcggtggccagggaaaatcagtgcaggatgattgcgattaccaacaatgcggcttcgccgctggggcaggcctgtgattaccacattacaacagcaacgagggagaagctgctcttaggagaattctgcttctcacgggtatcggctacgatggcggtagagatactttatctgtttctggcagtgagcaagaaggactcttatgaacatatcagacgccatgagattgcgatctctgaggataagaataattgaggcaattcaacaaatattagcaaggattctcccatcctctaaggtggtgagatgaatttaccgagcgtggattgaaacaaaagaaataagattctgtgacagaaaacggacatgaagcactttgtatgaaacgtacagggtgctttttgattttccgctgcctgcggcgggaatggtgactttacaggaaagttcatccagagaaataaaaatctgataaagtaactttgcttcggagcgagagtccggtttcccggactctctgctgtattttggagaaatgaaaaataatcatgcatgaaatcagcaataattggaaaaatacatagtaaaaaagtacaaaaaacgcgcgatgaaacagaaaaaatgcacaggatatttatggaaagtgacgaaaatttataagaaacaaaatttcttgtaaaaacacattgacgaaaatgataaatcataatatagtatagcagagggaagaaataaaattttataaaatgaggagaggtgacatatgatttacacagtgacatttaatccagctttggattatgtagtaaaagtaaatcacttcacgctgggaatggtcaacagaaccgtgcaggaagatatttattatggcggtaagggcatcaatgtatcggcggtacttaagactctgggcttccagagcactgcgctggggtttatagccggatttacgggagacgagattgaacggggagtgaaaaatctgggattccagtccgattttatccgggtggagaacggcttgtccagaatcaatgtaaagcttaaatcagaagaggaatcggagatcaacgggatgggaccggagattaccgaaggggatgtggaaaagctgtttaagcggcttgagaaactgaaggcagacgacgttttggtcctgtcgggaagcatacccagttccatcgacgacgggatctacgagcggatcatggaacggttagacggaaagggcatccgcattgtggtggatgcgacgaaggatcttctgatgaacgtccttccttatcatccattcatgatcaaaccgaataaccatgagctgggcgagatgttcggcactgtattaaaggatgaggaagaaatcatatattacgccagacagctgcaggaaaagggagcgtcaaacgttctggtctccatggcgggggacggcgctgtcttaatcgcagagaacggggcagtatgttccatgggagtcccgaaaggaacggtgaagaattctgtgggcgccggtgattccatggtggcgggattcattgccggctacctggagaatggaaattatgagcacgcattaaggcttggaagcgcctgcggaagcgccagtgctttttctgaagggctggcctgcagagaagatattttaaaactttatgaggaattacgacaggaggggttctgagatgagaataacggaattgttaaaaaaagaaagcatcgaactcggtgtgaaggtttcttcaaaggaagaggccattgatacgctgatcggcttaatggaggccggaggaaggctgaatgacagggccggttacaaagaaggaattctggcccgcgaggcgctgggaagcacagcggtaggtgaggggatcgccattccccacgccaaggtggcggcggtgaaggagccgggactggcggccatggtagtgcctgacggtgtggattatgaagcatttgacggttctctggcgaacctgatctttatgatcgcggccccggaggggggagcggatgttcatctggaagcgctgtcccgtctgtcaacgcttctcatggaccctgattttaaaaacgatttaatccatgcggagtcaaaagaggaatttttacagctgatcgatgacaaggaatccgagcgttatgagaaaaaggcgcgcaaagaggaaacgaaggcgagtgatgcggcaccggcagtccatgagactgcgaaatccggcgctgccggttaccgtgttctcgctgtgaccgcttgccctacaggtatcgcccatacctttatggcggctgagaacctggaacagctgggaaagaagatgggaatcccggtgaaatccgagaccaacggagccgagggcgcggccaatgttttgacgaaggaagagattgccgctgccgacggaatcatcatcgcggcagacaagaatgtagacatggcccgttttgacggaaaacatgtggtgaaggcttctgtttccgatggaattcagaagggcgaggagctgattaaacgggctgtgagcggtgaggctccggtctatcaccatacaggtgccgctgcatcagaggaaggcggggaaaacgaaggccttggccatacgatctataagcacctgatgaacggcgtctcccatatgcttccgttcgtaatcggcggcggacttttaatcgcactggcattcctgttcgatgattattccatcaatccggcgaatttcggtaagaatacaccggttgcagcttacctaaagaccatcggagagcaggcatttggcatgatgcttccggttctggccggttacatcgccatgagcattgcagaccgtcccggcctggcagtcggtttcgtaggcggcatggtggcaaagatgggagccactttcatgaatccggcaggcggagatgtgaactcaggctttctcggcgccttactggctggttttatcggcggttatatcgttgtcctgttaaagaaagtatttaaaaagcttccgaaatccctggaagggatcaagcctgttctcttatatccgctgctgggtattttcctgattgcggttgtcaccacctttatcaaccccttcgtcggggcgatcaatgacggtctgacccatctcttaaacggcatgggcggtaccagcaaggtgattctcggagccgttgtcggcggcatgatgtccgtggatatgggcggcccggtaaataaggcggcatacgtgttcggtacggcgcagctggcggaaggaaatttcgatattatggcagccgtgatggcaggcggtatggttccgccgatcgcaatcgcgctgtgcactacattttttaaaaagaaattcacagagaaagagcgccagtccggtctggtaaactatatcatgggtctgtcctttatttccgaaggagccataccgtttgcagcatcggatccgctgcgcgtgattccgtcctgtatcatcggatcagccgtggcaggcgggctttccatggcgttaaactgtacgctgcgtgctcctcacggtggaatcttcgtgcttccgacgattggcaatccatttggctatcttgcagcgattgtgatcggatcggtggtcggctgtgtgattctggcagcactgaaaaagaataaaactgaagcgtaatcgtcctgttaaggagagagaaaaggggaagatcagttggatcaaacactgatctttccctttttctgcaatgtcagcctcttcatttctggtatcatcatttcgaacagtcaccatcgttcagccgcaatttccccgcagctctcaaatgtttcccgtgccattttcccggcaggatggtataattgacagaaaatgagaggcagcgaaaggaaacgagagaatgctaacaataagacgagagagtctggatatcccgcagggacgccggattctggcggtcagcgatatacacggacacgttcactttttgaaaaaggtgctggaaagggccgggttctgtgaagctgacgaactgattatcgatggtgacatcattgagaagggaccgtattcattagagacgctccggtatgtgatggagcttggaaaactccctaacgtccatgtgatttcgggaaatgtggactgctggcagctggaactgatcgggagcagggaaccggagatgacgagggcactggctgaatttatacaaacggcaaaggaacggtggggaggcagcctttttctggatttttgtgatgaaatggggatagagcatccacggacagaagaggagacagctgccgcaaagaaacgggttcaggcctatgggcgggcggagctggaattcctgtcagggctgccttccatcgtggaagcgggcaattttatctttgtacacggcgggcttccaaatggctgggaagagatggaaggacaggaggccactccggttttaaagttcgacgattttcggaacagaggaggaagtttcgaccgctgcgtcgtggcaggccactggcccgtttgcctctaccgtcatgaggtggcggaatttaacccgttgattgacagggagaaaaatattataagtatagacgggggctgcggcctgaagcgggatggtcagcttaactgcctgatgatcgggaatcccaggggaaccatagaggaagtcagctggacatcctatggaggatttccggagatgacggcggttgacggccagaaagagcaaaaaaacaggatatccattcagtacacggataaccgcgtggagcttctggcggggcagagtgcggggccgggtctggtacgccttcgccatctgaccacggatactgtgtttgtagtgccaaaagactatctgtatgagcgggatggaacgctgcgctgtgacgatttctgtgactaccatatggaagtgaagccgggagagcgggtggaactggtggaggtaaacgccctgggaagcctgattaagaagaacggagtcagcagctggtaccatggaaggctggagccggccggtatagaatagaggagaaaccgatatgagtaaaaagaaggaagaaaccggtctgccgatgctccaaaaggaagctgccctgcttctggaagagctctctttatgcccggagacctcggctgtggctgtggggggctccagagccacaggaagagccgatgagaagtcagattacgatatctatgtatatgtagaaaaggaaattacggaggagaagcgcagaagcatcctggaaaagtactgcagcactatggaaatcgggaatcactactgggaggcggaggacaactgtacgctgaaggacggcgtggatatcgatcttatttatcggaacaggaaggaatttgagcgggaaatagccgccgttgtggagcagtttcgggcctcctgcggatataccacctgtatgtggcacaatctggccacgtgcaggattgtgtatgacagagacggagaactggaagcgatgaaaaagcggtttgatgtcccctgtccggaggaactgagggacgaaattatccggaaaaacagggcgctcttaagtggtgtgcttccgtcttacgatgcacagatacggaaggcctgggccaggagagatcttgtcagcgttaatcacaggacaacggaatttctggccagctattttgatattatttttgccatgaacggacggacccatccgggggagaagcgtctcgtgacgctgtgtaaggagagctgtgaaaatctgccggaccggtttgaggaaaatctggagcgtttatttaccgtgatgtacaatccggatggggaagttaacgacgtgattgcacgtatggtggcggaactggaccgggcgctgctgaaagtgcgaccgggagaatttacggctggacagctgccaatgggagcggcggagaaacagtaacagcatatcgcggagctttgcgatatgctgtatgaaagaaccggagtttaagaggtaaattccttcatctcctcgatctctttttcctgcgcatcgatgatgctctgggcgagagtcctgatttcctcataattggtgtactcgagaatcgatttggccatgtcgacggccatctggtggtgcatgatcatgccttcggcaaatgcgtgatcgaggctgtcggtgcctgccttgttcatggaatgatcgtgatccagcatcttgtcgtattcctctaaataggcgctttcctggtctgcatcgttatggccttccgtctcatactttctgatcagatccctcatctgccggatctcttccgtctgggtggttttgatggtttcggccagctttttcagcgtttcattgtttccgccgtattcgagataactgtcagccatctcgaccgcggactcgtgatgaggaatcatgccgtttaaaaagtcgatggaagcgtttcccgtcttgggaatgttctccatgtcgcgcatcatgttcctcatgatttcgtcctggcgctgcaggtaacggtttgtgtcgtcgtcagcggctgcgctgctggttccatgggcgctgtgatccatatgattctggctttccgtggccccggatgactgttcggtggactggctgctgctttccgtctccgcaggtgcaggtgaaagcggggctttcttacggcttccggccgcggcaaagacggcgaccgcgatgatgacgacggcggctatgattccggccgcccagtatttcatatttttattcataattccatttcctccatttctaatcggtatttttagtatgaggtggagagggtacgtttatgcaccatggaaaattctaatcttgtacaggatttccgattctggtaaaatgaggataaaaaaggaggagctttttatgcggacagaacaggaaatgttttcaatgattctcgatgcggcaaaggcggacggccgaatccgcgccgtatatatgaatggatcccgggttaatccggaggcgaaacacgatatttttcaggattatgatattgcttatgttgtgacagagacggaatccttcagggaggacagaacatggatcgaccggtttggggagcgcctctatatgcagtatccggaggagaacagcgagtatccttcggatgtggccaactgctacggatggcttatccagtttgccgatggtaaccgtctggacctgcatgtgcagacgctttcctggtccttacgtgcgatggaggaggaccggatgttccggattctgtatgataaggatggctgcctggcgaaagcgccggagccggcggcggagttttaccgggtgaaacggccggaggagagccggtttctctctgtctgcaatgaattctggtggtgcctgaacaatgtggcgaaggggctgtggagaaaagagataccgtacgcacaggatatggttaatttccatgtgcgtccccagctgataaggcttctgtcctggaaggcaggaatcgacacggatttcacgtgcagtccggggaaatccggaaagtatctgtaccgttatttatcgcaggaggagtggtcccgtctgatgaaaacgtatgcgggcggcagcgcggacgagatgtgggaagcggcagacgccatgtgcgtgctgtttcacgagactgctctggctgtggcggagcagctgggatttcagtacgataagagagaagcggaggcgagtctccattttttccgccatgtaagagggctgcctgaagatgcaaaagaactgtgaggggagaacctgaattggtaaaacagtggttccgtgagtggaaaaagcagatcgaccggtgctgcatggaacttgaacttgtcataaaggaggcaaaatgatgaaaacatataactggggaatcataggaaccggatccattgcgcgggagatggcggcagccctgactgcctgccgcggcaccgtctatggtgtctgtgggacgagcagagagaaggcggagcgctttgcggcggagaatggagttcttcacgcgtttgcggatggggctgcactgcttgcagatgagaatgtggatattgtatacattgccacgcctcataacatgcatttcgattacatcagacaggcggttctggctggaaaacacgttctttgtgagaaggccatcacggtttcgtccgcggagctggaggaagcggctgcgctggcggaggaaaagggcgtggtggtgatggaggccatgacgatttttcatatgccgctctataaaaagcttaaggagatcgtggattcgggagcaatcggcccggtaaagatgatttccgtcaatttcggaagctgtaagccttacgatgtgaccagccggttctttcgtaaagaactggccggaggcgcgcttcttgatatcgggacgtacgccgtatcctttgccaggtattttcttgatgagagaccggatacggtgctgtcagcagtgaaacggtttgagacgggggtagatgaagagtccgggatcgtccttatgggagaaaacggacagatggcggttatcgcactctccatgagagccaaacagccgaaacgcggcgtcgtagccggtgaactgggctatatcgaggtctctgaatatccgagagcagaccgggccgccattgtctatactgcagacggacggagggaggagattacctgcggcgacagcaagaaggctctggagtacgaggtggaagatatggaaaaagctgtgtcggaacatcttgtgtcagagagcatggccctttcccgggatgtcatgtggcttttaagcagtgtacagaagcggtgggaagaacaggaattgaggacagaacagggaggacagaaggatgtaccagtgctgcatatttgatttggatggaacgattatcaatacactgcattctttaaggaaaacggtgaatgagacgataaaacagtttggctatggccccatggatgagtaccacgttaagtattttgtgggagacggatataaaaagctgatggaacggacgcttaaatactgcggggatacagagcttatttattatgaggaggcgctggctgtctatgatgagatgtttaaaaagtactgtttgtatcaggtggaaccgtatgccggtatgccggagtttttgacgatgctgaaggaaaagggaatccggatcgcggtggtgacgaacaaggcccatgaccgtgccgtcgagtgtgtggagacagtctacggccccggcttttttgataagataaccggcgagggaaacggtataaagtgtaagcctgatcccgagggcgcccttaaaacggcggaggaatttcatgtaaaaccgtcgaaatgcctctattttggagataccaataccgatatgagaacaggaattaacgccggcatggatacagcaggggttctgtggggatttcgggacagagcggaactggaagcgtttaagccaaagtatatcatcagccatccggatgaaattaagtccctgttccggtaaccagatttgtgcagattaaaagaatgaataaaaataaaaaaagacaggaaactaaagagagatactctggacagaggttctttctcggctttgggtgcggggacgcgcagggagatttcatatcccgtgtccgccccgcttcctactcaccacaaaaatggccgggattgtcggacacaaaatgcatgtgttcgccattcccggccatttttatggttcgtatccagacggcggtacactgggatatgaaatctccctgcgcgtccccgcacccaaagccgagaaaaaacatgaacggacagaggattctctcttttttgttttcagaaaaaggagggacattttacgggataacggatagtccaaggaggagacatggcaaagcgttggaaatggggatttgtggtactggccgcggtatgggccgcgcttttcggaacgatgctgggatatgcctggaatgtgacgcatcaggctgagccgatgctgaaggtgccgatggaacaggttcagaataccaatatcagcgaggtggcccaggagacgatggaccggttctggactgtggctgtgtttggggtggattccagggagggaaagcttggaaaaggtacgaggtccgatatggagatggtgctaaatatcaatctgaagaccggagagatccgaatggtgtcggtttaccgggacacctacgtaaagattgatgaaaaaaataaatatgacaagattaaccaggcgtatttcgagggaggtccggcccaggccatatgggccctgagcgaaaatatggatttgaacatcgacgattacgtttccttcagctggaaggccgtggctgacgccattaacctgttgggaggaatcgatgtggagatcagtccggaggaatttaaggtgatcaacggttttattacggagactgtggaatccacgggagtcggctctcaccatttaaagaaggcgggagtgaatcatctggacggggtgcaggccgtggcctacgcaaggcttcggaagatggacacggactttatgaggacgaagcgccagcggctggtggcggagctggtgctggaaaaactgaaagaggccgatttaggtacggtgcgccaactggcattttccatacttccccaggtctcctccagtgtggggatgaaggatatactctctctggcaggtacggtgtcgaaattccatctgacggagaccgagggcttcccgtttgagctgaaggacgctctggttggaaagaaggactgcgtcataccggtcactctgcgggacaatgtgatccgcctgcaccagtttttatttgacgaggaggagtatgtaccttcgaagcaggtggacgaaatcagccggcagattgagcttcgtactgcaaaaagcaaaaaaaagtaaaaaaaatacttgaaaaaacagttagcatatgctaatctatatgaagttagcaatgactaacttaaggctttcaaaaatctggatcgataaaataagtttactccggggataatgagaaagaggaaggagtgaaacggatgtcaacagacgcaattatgtcatatatttcagagtgcagccgcgcaggaaggctggagtttcaggtttccatccagtgcgcccccgtcttaaagggaatcaaggcatcgaatcttgtgacgatggcaaagggatcgctgcaaacggtaagaaatgcgctggcaggtacggaaattacggcggttatgctggcagccggtgacaggacggaggttctgcttctgtaccgctttcccatgctgaaagcaattctggcaaataaggaaatcagagagtttttaaaatcctgcggttacgtgcagtttgatttggcgtcgattctgatgggattaaaacgcaaatataccgcatatctggccggcagcggagaattccctcacgaactgggcgttcttctcgaatatccggtcgaggatgtcagggattttatccgttataacggggataagtttctgtttaccggttactggaaagtatatcataatcctgctcaggcaagggcgaaattcacccggtacgaccgggcgagagaagccgccatgcagcagatcataaatggatgccgcctgcatgaagtggcggtaagaaagggagaataaaacatgagtgatatttacgtagtatattttagttcaacaggaaatacagaggagatggcgaagcatgtggctgacggaattgaaagaaagggaggcagtccggtgctgaccgagatcggaagtatggatccggaccgcttaaaggaagcttccgcctttgcactcggctgtcctgcctgcggtgcagaggagctggatgagagcatggagactctgattgaggagatatccggttctctggagggcaagcacgtcggcctgttcggctcttacggctggggcggcggcgactggatgcgcgagtgggaaaagcgcatggcggagcgcggcgccaggatcgtcggcggcgaaggtgtaatcgcgctggagtccccggatggagacgcagagaagcagcttaagagtctgggcgaagagctggcggaattaggataatccgggcgaaaaacgaaaaagtcagaaatcaaagaggcctgcaggaatcgcgatcgaacattcctgcaggccattctatactcattctctctattccagaacaaggaaagactgtggttccagaatgatgcggtcctcctcccatctgccgtttccgatggaatagatgacggatttctgaccaacggaaggaaccgtgaccgtaccgccggctggattgacagcaacagtcagagccccacgccggtatacgaaggccgccgctcccttttccgcatagaccggttcaaaggccgcatcggcctgtaaatcggcgtttgcgtggcgcagagccagcagggattttacggtgtgaagcagggaaccgggatccgattcctgtgcggcaaccgtgggcgcgtcgtctgcctcgtcaaccgggagatagaggctgtctttttctgcttcggagaatccggcgttcttttcatggttccactgcatcggagtacgggaaccggttctgaaatagccgccttccttcgtggggagctctaagtatcgcattccgatctcatctccgtaatagagataggggacgcccggcatggtgaaaatgaatgcaaaggccagctttaactcggcctcgtccagattatagcgggggcggagcgtgtcgtgattgcaggtcaggagacagaagtagccgttatccctggaagcttcgtatctggggaggtaatcctccaaaaatcttgtgatatcgccatggccatcctttttaaagaagctgtggtcctcctggttctcataatcccgcatcagggtgctgtagccgttgccgcgtccgtttaaaaagaagtccatgtggaagcctgccttaagcgcaagctggggattgccccattcggagaccatagcggcttccggatagtcgctgtccagcatttccctgacattactccagatggcgcaggtgcctgtcttttcctcatcgtcattctttacgagggaggcggccatgtccacgcggaaaccgtcacagccctgatcaagccagtatcgcatgacatccttcatggcctctctggtggcgatgcagtccggatgatcgacaggaagctgccacggctcctttggatttaaaaatccataatttaaggctggctggcatttgaaaaagttgagtacatagacgccgctgcgttcgctctctccgccgatatacggaaatcccttagcgccttcgaagcagtggctggtccagatatagcggttggagtattcgttggtttccgccttctgactcatggtaaaccagggatgttcctcggaagtgtgtccgggaacgaggtccagaaggacgcggatcccttttttgtgggcttccgcaaacagacggcataaatcttcgttggttccgtagcgggatgctgccttcttatagtcacggacatcgtagcccgcatccttaaacggagagtcgaagcaggggttgatccacagggcattgcagcccaagtcccttatgtagtccagtttttcgatgattccctgaaaatctccgattccatccccgttggtatctttaaatgactggggataaatttcataaaatactgcatcttttaaccattgcggcatgactgtttcctcctgtttaatccatacattgtcattgggatccgaaaagatatcacagcattgcggttgacatctcctatattgataatatactatagagataaaagaaaatcttgcaaaataataccggatagtaacacaatcctatgatgttacggaggaagaagaggaatggagaaaattgggcttcagacggggaacgcaggcggccggatgccggactataaagaaaagacgaatcacggggatgcgctgatgccggtccgctattaccactgttccgtgccgaattcctacagaaatttatcgctgcactggcatgaggagatggagatcactctgattaagtcggggaccatctactatgacattgattttgagactttttcggtggagaagggggatttgcttctgatttctccgcatattctgcattccgcccatgagatgccgggaaagagtatggtatcggacagccttgtgttccatcttgactttctgggctatcaggttccggatgcctgtacaataaagtttttaaatccggttcagtccggaaaactgcgctttcttcctgttgtaaagccgggggcggccggatatgaggagatgaaggagtgctttgtcagtctgctggagtgttttaacgggaagcagtatggatatgagctgtatacgaaggagctgcttatgcgcctgttccgtctgctgtaccagtacggctgtgtggcaaagcatgaggggactcacggggaatttggcgctgaggagaagttaaaagaggttctgtcgtatattcagtcaaattacagggaaacgttaacgatagaggagctgtcatcggtctgccatttcagccagactcactttatgaatttcttcaaacggtatgcgggcatgacgtgtatggagtatattaaccattaccggatcaccagagcggcggccgatctggtggagacggagcggcaggtgatggatatcgcgatggaaaacggctttcggaatatctcgtattttaataaagtatttaaggaacgtttcggggtgacgcctgggagctaccggaaaaacagccgggaaaacctttccctgccctgtaaaatgtgatatactatgcagatggaatcagataggagacggaatgaatgaataaaaagaagagaatcccgcggctgtgctgcatcggaaccgtgattctggctatgattctaaccggctgtgtcaggcggcagagcccccctacggagacgaaaacagagggcgggaagctgaatgtggtgacaacgctgtttccttactacgattttacgcggcagatcgccggcgatcatattgagctgaccatggtggttccggccggcatggacagccattcctttgagccgaccccggctgacatgattacgatacagaacgccgatgtgctgatctgcaacggcggagccatggagcactggctggagcgggtcctctcggcggttgaatcaccccatatggttattatgacaggcatggattatgtggataccgtgcaggaggagatcgtggaaggcatggaagaggagactcatgatcacgaccacggccatgggcatggagacgaacccggtcatgaggacatgtacagccatgatctggctgacgatgacggccatggggaggagattgagtacgatgaacatatctggacctcaccggtgaacgccatgaagctggtaaagggcatcgaagaaaccctgtcagccgccgatcccggcagccgtgcagagtatgaagcgaacgcggaaagctatctgttaaagcttaagcagctggatcaggagtttcgcgatgtgaccgcccatgaaaagcggaatatgattattgtgggggacaagttcccttaccgttatcttgcagatgagtacggtttgcgctacagggccgcattttccggttgcagtacggatacggagcccagcgccaggaccattgcctatctcatcgataagatgaaatcagagcagattccggtcatctattatccggagctgaccagccaccgggtggcggagatcattgcggaggagaccggcgccaagccgcttctgctgcattcttgccataacgtgacgagacgggagtttgacagcggagtgacctacttagagctgatggaacagaatgtgactaatttgaaaaaaggacttgaatagatgaattcattgatacaatgcagccatgcggatttcggatatgaaaaccaggatgccgtggtggatgtcacgatggaagtgaatccaggtgactacatctgcatcgttggagagaacggttccggaaagagtactttgatgaagggacttctgggactattaaagccgacaaagggtaccatatccgtgtcggatgaactgaaaaaaagcgggattggctacttgccgcagcagactgcggctcagaaggattttccggctaccgtcggcgaggtcgtactgtccggctgtttaagcaggcggggaaacaggcctttctattccggaaaggaaaagaagctggcggaaaagaatatggaacggctgggaatcgcagaactgggaagccagtgttaccgggacttatcaggcggacagcagcagaggacgctgattgcccgggctctgtgtgcgacagacagactgctgatcctggatgaaccgattacggggctggacccgtcggcgattctggagttttatgagattatcagaaagctgaatcgaaaagaaggtgtggcgatcttaatggtatcccacgatattgccaacgtggtaaagcaggcgggaaagattctccatttaaagagggaagtgctcttttacggaacgacaaaggaatatttggagagcagcgccggccacctgtatctgggaggtgagctgtgatggagatggtgacagagatgctttcatacccgttcctcgtcagggctctggtgggcggaattctcgtctcgctctgcgcgtcccttctgggcgtaagccttgtactgaagcggtactccatgatcggagacgggttgtcccatgtatcgtttggagcgctttccatcgcggtggcggccggatggtcccccttaaagatctcgatccctgttgtggttctggcggcgtttttcctgttaagaatcacagaacatggaaagatcaagagcgacgcggctatcgccatgatatcggcggcggccctggcgatcggaattatcgttacctccatgacaaccggtatgacgacagatgtaagcagctatatgttcggaagtattctggccatgagcaagacggatgtcagactcagcgtggtcttaagcattgtggttttggggctgtttctgatctgttacaataagatttttgcagtgacctttgatgagaattttgccagagccacgggagtcaacgtttcgtggtacaatgtgctcatagcgattctgacggcgatcacgatcgtccttggaatgaggatgatgggagcgatgctgatttccagcctgattattttcccggcccttacctccatgagaatctttaagagcttccgcggagtcgtactgtcctccggagtgctgggcgtcgtgtgcttctgcatcggtatggtgatgtcctaccggttttccacaccggcgggcgccagcgtggttgtcgtcaatctggcggcattcctgctctttacggtggttcagtgggcccttcatttacggaccggcggaaagaaagaggagcttaagtctcctgcaggggtaagtaaaaatacagaagcagaaaggcagcagcagtaacatgaatgagaaaaaattaatccatgccaggcgccatgtgagccagacacagtttattgcatatggatttttctgcgtcattataacggggacactcttgctgatgctcccctttgccagcagggacgggcagtcggagccatttttaaactgtctgtttacggctacgagcgcatcctgtgtgacgggccttgtggtggcggatacctggagccagtggtccttattcggccagctcgtcattctgaccatgattcagattggcggtcttggctttattacggtgggcgtctttatctctattatcctgcggcgaaagatcggactgaaggagcggggccttatgatggagagcgtcaataccctgcagatcggcggggtggtacgtctggcgaagaagattatcatcggaacgtgtatcttcgaggggacaggcgcggtgcttctggcaatccgcttcattccccagtttggctttctgcgcgggctgttttacggcattttccactccatatcggctttctgcaacgccggcttcgacctgatgggaggacaggcgccatacagttcttttgtggcctattatgacgactggctggttaatctggtgattatgtctctgattgtgatcggcggtatcggtttcattgtctgggatgatttaagccggaataagcttcatttcagaaaatatatgcttcagactaagattgtgctggtaaccactgccatactggtctttggcggcggcctgctgttttatctgatggagaggaataatcttctggtggggatgaataccagcggaaagatactgacctccttattcagctcagtgacggccagaacggccggttttaacacgacagatacggcggctctgacggatggaagcaagctgctgaccatcattctgatgtttgtcggaggaagcccgggatcgacagccggcggtatcaagacgacgactctggtggttcttctcttatgcgtgcattccaacatcaagcagacgtatgggattaatattttcggccggagactggaaaacgatgcggtcaagcgcgccggaaccatactgacgatcaatctgctgttggcgcttacggcgtcgctggccattatggcgatacagccgctgggattttccgatatcctgtttgagacgttttccgccatcggaacggtgggaatgacgacaggaatcacgagagcgctgcacccggtatcgcgattaatcatcattcttctgatgtactgcggaagaatcggaagcctttcctttgccctggcttttgtccagtcaaagagaaagccccatgtccagcagccggcggaggcgatcaacatcgggtagccggctgaagcgccggtattgtgcggcgcagtgcaggataaaacgcaatgagagaatgcaatgtgaatctaaagctgcagaagcaaaggagaatatcatatgaaatcgattttaatcataggaatggggcggttcgggcaccatctctgccagaatcttgccgctctgggcaatgatgtcatggttgtggatcagaaggaggaggttctggaggatctgcttcccatcgtgaccagcgccaagattggagactgtaccaacgaggcggtcttacgaagcctggggatcgccaacttcgatatctgtttcgtctgcatcggaacgaatttccagagcagtctggagatcaccagtctcgtaaaggagctgggcggccgccgcgtcatcagtaaggcgaaccgtgatatccatgccaagttcctcttaagaaacggcgcggatgaggtgatctatccggatcgtgatatcgctgaaaagatggcgatgcgctacagcgccaatcacgtcttcgattacattgaactgacacaggaatactcgatctacgagattccgcccctgccggaatggatccataagaccatccgcgaggcggacatccgcaaccgttaccacatcagcgtcctggggatcaaacgtgagggaaaagcccagctcatgcctccggccgattatgtgattcaggcgcaggagcatctgatggtgattggcaagaaggtggatattgacaatatacttgaaaagatgaagtgaggatggagctgattcagaatcaggcatgatcagcggtaccggttccatccgggttaagtgaatatacgacagttacgcaaaatcatgcgggcggaagacggaatatgagcgtcttccgtccgtatttttttcctgttctgcgcatctcctcccgaaaaatatgccagtatttcccttattgagaattattttcaaaaaagtacttgattttttatttgaattagcatatactaactactgataagaaaatgaaattgagaatagttttcaaaaataagcagaggtggtgaatatgatgcctttaaccatggcaagaaccggcgaagcacagattatacggaagatcggcggaaatgaagagacaaaaaggtttctggagaatcttggttttgtagcaggcgcagcggtcaccgtagtgtcggcgatcagcggcaatatgatcgtcaatgtaaaggattccagaatcgcagtgaatcaggatatggcaaaaaaaattatggtttagtaggaggaaaagaggatgcagaccttgaaggaaattccatgcggcacgaccgtaaccgtgaagaagttaaacggagagggcgcagttaaacgccggattatggatatgggaatcacaaaaggctgttctgtatttgtcaggaaggttgcgccgctcggggatccggtggaagtaatggtgcgagggtatgagctttctttgagaaaacaggatgcggaactgattgtggtagagtaaaagatcagggaagggcggacgccctatattttaagaatgagagttagatatgactaactaaaggaggaacaagagtatggcaatccgtattgcactggcaggtaatccgaactgcggaaaaaccaccatgtttaataacttaacaggctccaaccagtatgttggaaactggcctggagttacggttgagaaaaaggaagggaaactgaagggaaagaaagacatcattatcaccgaccttccgggaatttattccctgtcaccgtatacactggaagaggtcgtaagccgtgactatttaatcaatgagagaccggatgcgattattaacctggtggacgccacgaatctggaacgtaacttatatttgacgacacagcttctggaactcggtatcccggttgtcatcgccctgaacatgatggatctggcggtgaagagcggcgacaagatcgacgagaagaaactggctgcagcgtttggatgtgaagtggttgctacctcagctttaaagggcgagggactgactgaagtggtggaccgtgcggttcgtctggcaaatgccaaaaccattcaggtgccgaagcatgagttttccagagaggtggaaggctgtctggccgatatcgcagaccttcttcccaattccgttccggaccacctggcgcgctggtacagcatcaagctgttcgagcaggatgagaaggtcctgggtacgaccccgctttctgccgattcctcgaagcgcattgtggaaatcgtgaaggatgccgagaagcagatggatgacgatgcggagagtatcatcaccaacgagagatacgaatacatatcgaaaatcattacgggctgtttaaagaagaatcgtaagggaatgactgtttcggacaagattgacaggattgtaacgaacagaatcctggcacttccgatcttcgttgccgtgatgtttgtggtttattacgtttccgtcacatcattaggaaccattgttaccgactttaccaatgatacgctgttcggcgcatggatccagccggccgttcagggcttaatggaaaccgcaggcgcttccgaatggctcgtttccctggtggtggatggtatcatcggaggtctggcggctccaatcggattcgctcctcagatggcgattctcttcctgttcttatctgtcctggaagactgcggatacatggcgagagttgcatttatcatggaccgtattttccgcagattcggattatcgggaaagagctttatcccgctgcttatctcttccggatgcggcgttccggcgatcatggccactaaaaccattgaagatgataaaaaccgccgtatgaccattatgacatcgaccttcgttccctgcggcgcaaagcttccggttatcgcactggtagcaggtgcaatcatgggtggggcttggtggatggcacccagcatgtatttcatcggaattgcatcggttatcgtatcctgtattattttaaagaaaacaaaaatgtttgcaggtgatccgtcaccgttcgtaatcgaacttccgcagtaccacgttccgtcagtgaagaccgtgctgcttcacgtatgggagcgtgtatggagcttcttaaagaaagcgggaacaatcctgttcctctgctgtatggtgatgtggttcctggctacgttcggtgtggaaaacggcgcctttggcatggttgaggatatggaggcttccttcctcgcgatcatcggtaccttcctggccccgatctttgcaccgctgggctttggaagctggcaggcagttgcatcttccctttccggcttcgtggcaaaggagggcatcgtcagtacgatgggtgttctcgccaatatggcggaggcaacggagacagatgcggctctgtggcagtatgttatgacggatttcttccacggaagcgctcttgcaggctttaccttcttaacctttaacttactggattctccgtgcctggctgcaatcagcaccatggcgaaggagatgggaaataagggctggacagcatttgccgttatcttccagaatgtgttcgcttatgcggtatgcctgatgatctaccagctgggatcattcgccatgggcggagggttcggtattggaacggcagtggctgtcatagttcttgctgccggactgtatctgctgtttcgtccggctcccggagcgggtaaaaaggcagaaactgcagcggccggaatttaggaatatgaatcggcggtgtgacagaggaagctgaaaccaatgttttgtgactgattatagaaaagagggatacttatggtaacttggttagctgccaatgcggcaacaattataatttcactgataatactcgcgcttacgggactggcggttcgttctgtctataagaatcggggaacctgcagctgtcagagcaagagtggctgcggcggacagtgcggttgctgccatggctgcgctccggtccataagccgcactcgtaagggggaggttgatggaatgaatcagactgatgccctcgaagagaaacgaagctatgtgattcgtgaattaaagagaaatggatgcagaatcacaaaccagaggcagatcctgatcgatgtgattctccaggacgaatgctgctgctgtaaggaaatgtattatcaggcactggaaaaggatcccaccatcggaatggctaccgtgtaccgtatggtgaagaccctggaggagattggactgatccggagaaagaatctctaccggatcgagggagacagcgcataaagaggccgggattccgggcaggaatgaaaggcccggcactgtcttatcaggaataacaggaaccgtccgtgacacccatgcagaaagatgcatgagtatcacggacggtttgtttatttccggaacgggagagaggtagatttatagaggaaaatcgtatatgatggaagctgcatgcttttcgttttttagatgtaactttttggagaaacaggagtctatataggtgagggctgtatgatttaagaaaaagcaaaggagagacatccgtgggagtgagatttgaagaagtttaccaaagacagaaacatgcggtatacggttacctttcctatatgacaaaggatgaagatacggcggaagacctggcgcaggagactttcttaaaggtttacctggggcttaagggatttaagggagactgcagtgaaaaaacgtggtgtctgacgattgcacggaatacctttctgtcctttgccagaaagaaacagccggtgcttctggaggaaggtgacatggaacggctggaggccggatacgagagaggaccggaggaaaagcttctggaggaagagaaggcaaagctgatccgggaggtgctttcttccttaaatgccgatgacaggacaatcatcctgcttcgggattatgaaaaaatgacatatgcagagattgccagggtgacagggctttcagaaaccgtggtaaaggtccggcttcacagggccagactcagataccggagccggtatgaacagagaggaggtgacggatgtggcatgtgattacagagagcgtgttctgaggtatctgcgggaaaataccgaggaccccggggtggaacggcatttagaggaatgcatggagtgccgcgcgctggtggaggggtatctggagaaagagaaggaactggacataccggaggccggttatgaagggacggatgaggaactgaaggagcgggtagtccattttgaaaaaggaaccagaagaatcctggtgtttaccctggtcggctttgtgctgggatggttttccatcgcatattttacggattcctttctcgtgacaaaggtgattctggccattccgtacaaggccagtgagatgctgcacaatctgtttcactcccatccctacagttattatggcgggaacggaatgtttacggaattcaacgaattttttccgggaagaggccttctgacctttttggcggagcggattacgccggttctgatcggtggcgctgtctatggaagcctcgcctattttaccggggattccaggatctttaccctgcggcggtatttgaagtttgctgccatatgggcggccgtggttcttctgtggacaggggcgctgctgaaggcggacacgctgctggcggcaaaggatgaccgcatggaggatgtgaccggattctttctggcaacagacagccagggaaacggtttttatgaagagaaggagccgggagcgaacgacactgttttccgtcttctccgggatgccctctatcaggagggaaatcccctgaagcgtataggcgctgaggtgagagagccggaggatgaactgcagcttcagatctttctgggaaaataccggcgggattccatgatctgccggttaaatccgaaagaacactatctggtgacggagcgcggtacggtttatcgggtaccggaagaattctccagatacatgacgcaataccaggaggactgttttgagtccatatatgaagagtactacggggaggaggcaggtgagaatgaagaagccggagggatggaaaattaaaacagggaaggactggtgtctggcgtttctgttagcggcactgatggtctatgtggcagtggtacgcttttttcaatggaaggttctggattttatgcagaaattcatgccggataagatgagtaccatgaacctgccgggcggatacgggacagtgctgttctgggcgctgattatggcgctgcttgtgatggcagtgctggcgcttcggcggcagaaacggaagtatatagcggcggcaggactggccggttttctgattgccgactgtgcactgggcggtttcgtatatcactgcaggctgattgtacaacggggaacggaggagcctgcggcttccgcctggatctgttttgaggacgggacagaacagatgaagctggcggccggggatgagacgctggaacggcttcaggcgctggccttttccctggagcggcagccggcagagagacaggaggagctgcgggagcttgtgagagacggggggaaggaacgctcgtttgtctggttttcatttccggataaatatttccacgggtatgatcccatcttttatatagaagatgggctgatctacatgaaccggagggctggggatgtggtgttttataaggataacggcctgaccgaatgcatggaagaactgaaaagcgctccggccctggctccctgacggaacgaaaaccccgaaatcccggctaaagtaattgacgaaagcagcttttcataattctgtaagtttacaagtttatcctgacaatgagggtctccggcttgactttacaggaggtttgtgacaaaataggtagttgtaatgaatgaaaaacctggaaagaaaagaggtccttaaacgatatgacaaagattgatattatttccggcttccttggagcgggtaagacgacttttattaaaaaactgctggaggaggctatctccggagagcaggtggttttaattgaaaacgaattcggtgagatcggcatcgacggcggattcctgaagaattcaggaatcgagatccgggagatgaacagcggctgtatctgctgttctctggtcggagattttggaaaatccctggcggaagtgctgacaaagtacaaaccggatcgtgtaattatcgagccgtcaggcgtgggcaagctttctgacgttatgaaggcggtcagagatgtggctgcggaaatcgaggttacattgaacagcgcagtcaccatcgtggatgtggcgaaatgccggatgtatatgaagaatttcggagaattctttaataatcagattgagaacgcgggaacggttgtcttaagccgtaccgacattgctgctgtggacaaggtaaaccaggcggtagaactgatccgtgagaagaatccggctgcagtgattgtcacgacaccgtgcagccagctgagcggcgcacagcttctggaaattatcgagaagccggatacgatggcggaagatttaatgaaggaagttgaggagcaccgccgtcatcatcatgaccatgagcatggagaagagtgtggctgcggccatgatcacgatcatcaccacgaccatgagcatggagaagagtgcggctgcggtcatgatcacgatcatcatcacgaccatgagcatggagaagagtgcggctgcggtcatgaccatgatcatcatcacgaccatgaccatgagcatggagaagcgtgcagctgtggtcatgatcacggccatcaccatgcggacgaggtattcaccagttggggccttgagaacgttggggtgatgaagagagaggagttagaccggattctggacgaactggcatacggtgaccagtacggggaggtgcttcgagccaaaggtatggttcccggagaaaaagagggaagctggctctacttcgaccttgtgccggagcagtatgagatccgtgacggagctccggaatatacgggcaaggtatgcgtaatcggtgcaaaactgaaagaaaatgaattaaagaaagcgtttggcaggtgagaagatggaatacacggatacattagatgacgattttatgccggtctttttgatcaatggatttttggaggccggtaagacccagtttctccagtttaccatgcagcaggattattttcagaccgatggaaagactcttttgatcgtctgtgaggacggggatacggagtatgacacagagctgttgaaacgcaccaaaacggcaggaattttcatcgaaagtatggctgagcttaccccggaacgccttctggagctggagctcctttataatccggaacgggttttaatcgagtggaacggcatgtggaatcaggatgaactgcagctgccggatgactggcgtgtttatcagcagattaccatcatcgatatgtccacctttgacttatatgtggcaaatatgaagcctcttctgtatgccatgattaagaattctgaactggttatctgcaaccgctgtgatggaattgaggatttatcaggctaccgaagaacgttaaaatccatgtgccagagaggcgagatcgtctttgaggactccgagggagagatcaatgagattgcagatgaggatctcccttacgatctgggggcagatgtcattgaaatttcgccggaagcctatggtatctggtatatcgactgtatggaccggcgtgaccgctacgaaggaaagattgtggaatttacggccatggtattgaaaagcccggaattcccgaaaaattactttgttccgggacgtatggccatgacctgctgtgaagccgacatgaccttcctgggatttgtcacaaaggccagagaggctaaggacttacagacgaaacagtgggtgaaggtccgggcaaagatcgcctatgaattctggaaagactatgagggggaaggccctgtgctctatgcggaaaccgtccagccggcggaacccatcagagaagtggttcagttttaattaaaaaccgacagtgaggatttctgtttcagtttagaatgaaaaatagctgtgaagcggatcgtttgcgattccgcttcacagctatttttgagtttgtaatacgtccggaagattacatctggggcaccggagtcggcctggcaggatcaaatacatccgggacgttgaataagtcgcttaagctgtccgggtagtagtacatgcggtagccgtctaaattccgtctgccctgacggaaatgatcggggcccagctgcatccagtaaggcgtgctggcatccacgttgcagaaatagcggaatcccagtgatttcaaataggtgaagcgttcgttgtcatccgtataaggcttccaggttccgatatcgctgccaaaggggtagagaatgatatcagtggggccgatcagggactccacattcttttcccatttgtccgcgtccactttgaaatgctccatgctgatcgtacccaagttgcggtggccccagctgtgggaagccagttcccagccatggtctttcaggcactgggcgacggcggccgcctgttttaagtcctcctcgtaattgggattggtgtccttataagattcatctgtccggtatccaagaattccgttatagccggtaaaggcgataatggctcttgcgcccttataagaaaatcccgggtgttccttaataaaggtttccagtatgggaacgagatcgaaatctccggtgatgacgcttccatcctcctgctccatctcggtggtgggataaccgtcttccccgatcaccatgcgggtggcgaagccgtcccccttcatatattcatagtagcatacatcatcctgcgacatgacaaaagcctttttcccttcggggagcatgatatcaccgtagacaaacttgggattgccgttttcatcggttgtctcataggcgagatcatggatctttacgagaacgtaccccctgtcgtacatggactgcatcatcttgataaactcgtcttttgtcgtcatcatctggttgtagccgccctcccggctgtctccgtcgaaggctttggaggtatcgacgatcagagagtggaagaacacgtgggtgacttcctgcggattgatccgtaccagccggctcatttgatccgtgtaggcggcgatggcatccgcagcttcctttgtggaggcgtagcggctgtcggaggtgattaaattgatggcaccttcgtaatcgtactgtgcggccagactttccgcctgtgtcaggaggtcggttaaaccggtgtcctccgtctcagccgccgttgtaatgatctccggagcggtggtttccgccgtggtctgatgaacggaggctttgaccgagccgaacccggagcggtaccggccaagtatgatgccgcccgtgactaaggcggctatcagtaaaaatcctgttacaatgacaagtatattatgtatcatgcggcggcgtttttcctgctgacgccgttcgcggtattcttccatgttcatgttataacctctttttccagtgtattgaagggagctttgggaggccggatcactcgggaccggcccggataccggacacagtacaaactcctgactcagtatatcatactttcagacaggatgaaatcgtatcacgggaaaattaaggaaaaatttttggcaaaaactggcataggaagggaaatcccatccatacaatgaaacaaaggatttaatcaggggaaattatgaaacgattgttagctcttgttttaagcatgctgcttttcctctgtccgtctcatgttgcgtgggggcaggagccggacattgccgtggcgtcggacatggtaatccggtcggaagaagcaaaggccgtaaacgccgagggagggccgtccatacaggcgcccagtgcgcttctaatggaggcatccaccggacaggtaatatacgaaaaagatgcagatacgaaaaggagtcccgccagtattacgaaaattatgacgctgatcctgatttttgacgctctggattccgggaaaatcaaaatgaccgacgaggtggttaccagcgcccacgccaagtccatgggaggttcccaggtctttctggaagagggggagacccagacggtagagaccatgatcaaatgcatcgtggtggcttccggaaacgacgcttccgtagccatggcggaatacatagccgggacagaagaggaatttgtgaaaatgatgaacgagagagcggcagggcttggcatgaccaacacgcactttgaggactgctgcggtctgaccgagtctcctgatcatgtgacgacggccagagatattgccctcatgtccagagaactgattaataagtatccccagatccacaattactccaccatctggatggagaacatcacccacgtgacgaaacaggggacgaaggagttcggcctgtccaacacaaataagctgttaaaaatggcgacgaactttcaggtgaccggtttaaagacggggtctacctctctggcaaaatactgtctgtctgctaccgcagaaaaagacggggtccgtctgatcgcttccatcatggcggcacccgattataaggccaggtttgcagatgcgcagacgctgctgaattacggctacgccaactgccgtctgtatgaggataaggagatgcttccgcttccggaactggcagtggataacggtgtgacggacagcgtgcccttaaaatacggcggcaccttctcttacttaagtttaaacggagaagatctggctgccatagagaaggaactggtactgccggaatccatagcggcgccggtagaggaaggacagagtgcaggtgtaattcagtacagtctggcgggaaagaagctgggagaggtccaggtactcacggcgggagcggtgaaggaagccggattcctggattactttaagagagtgctggcgggatttgcagtttgacggagtgcggccggaaatgaaaatgggaggaaaagcaggcgctgcttttcctcccgtttctttaaagaagacctccatactgcaggaacagtggagcaaataccagggaaacaattgtcatcagcttaattaagatattgatagacggtcccgaagtatccttaaacggatcccccaccgtgtcgccgacaacagccgccttgtgagcagagctgccttttccgccgtgatggcctgtctcgatgtatttctttgcattgtcccaggcgcctccggcgttggacatgaagatggcggtgagaacaccggttaccagtgcaccggttaaaagtccccccagtgcttccggtccgagaatcagtccgacggccagtgggacgagcactgccataaggccggggaggaacatttcgcggagcgccgcagtggtggagatggatacgcaggaggcgtaatccggccggtcggtccctttcaggatacccggcttttcacggaactgcctgcgcacttcctcgatcatctgatgggccgcctttgacacggactccatcgtcatggaagagaagaggaaggtgagcattccgccgatgaacagtccaatgatcacatgagcatttaaaatatctatggtggttaaatggactgcttccgcataggagacgaacagggccagggcggttaaggccgcagaaccgatggcgaagcctttgccgatggcggctgtggtgttgcctacggaatccagtttgtcggtgatttcacggaccgaatcatcgaggcctgccatttccgcgatgccgccggcgttatctgcgatgggaccgtaggcgtcgattgcgacggtgataccggtggtagagagcattccgaccgcggctaaggcaattccgtagaggcccatcagacggtaggagacgagaatgccgatacagaccagaaggatcggaatcgcagtagactgcataccaacggcaattccgctgatcactgtggtggcggatccggtctcagactgactggcaatcttttttacgaagcggtaatccccggaggtatagatttccgtgacgaatccgatcataacacccacaaggagaccggcgatgaccgcaaatgcggcattgaagctgccgaagtacatgcggcttaagaggaatgcggcggccacaaccagggcggtggcgctgtactctccggatttcagtgcgcggtggggattggaattgttgtccgctctcacaatcaaagccccgattatggacgcgataaccccgcatgcggagagcagcagcgggaagattacgcctgcctcccgataaaatacgacgcccagcgccagcgcagatatcagggatcccacatacgactcgaacaagtcggctcccataccggccacatcacctacattatcgcctacattgtctgcgatgacagccgggttcctggggtcgtcttccgggattccggcttccacttttccaaccaggtcggcgcctacatcggccgctttggtgtaaattccgcctccgacacgggcgaataatgcgatggaagaggctccgaggctgaagcctgcaagcacctccacattctttgttatcaggaaaagcgttccgacacccaggagtcccaggccaacgacggccatacccatgacactgccgccggagaacgccacggataaggcccggctcatgccggaggtttttgcggcattggcggtacggcagttggcgcggattgccgcgctcattccaagataaccggcaatggtggagaaggcgctgcccacaaggaagcagatggccgtagtccagctgcgcgttccaaggccgatcacaacgaagaggacggcgacgaagatgatgaggacgcggtattccgacgtcataaatgccctggcgccttctgcaatggcgtccgcaatctcacgcatccggtcgttgcccggatcctgcttaatcacatgaaggcgcagaaaaacagcgaataaaaggccgatcaggccgatgacggggacagacagtatcattttttccataataaccctcccaattttcatgatatttgtgcaaattgatacctgtgtcccttattgtatcagataaactgcgatattacaacaaaaacttttagataacctaaaaataatttaggattatttgtttttcaatttagttgacaaacaatattatacgatatataatataaatatactatacaagatataatatagaacacaaaacaatattatactaaacaataagagaaaggtcgagtgagtatggagacgaagcgtttataccgttcagtaaagaataaagtgatttgcggcgtgtgcggcggtatcggagagtattttaatgtggacccggttattataaggctcatatgggtgattctgatgttcttccagccatggcgccatttgttccattcgtttgcgggattttccctcatcggcggaagcctggtcgtttatttcattgcggcagtcattataccgcgggcgccctcagatgacggaagctgctgagctgtccggatctgactgaatgagaagataggagtgggaatatggtttttaacacaggtgcagccctccttgatgcgattgtactggcggtcgtgtcaaaggaacaggaagggacttacggatataaaattacacaggatgtgaggaatgtcatagacatttcggaatcaaccctttacccggtgcttcgcaggctccagaaggaagagtgtctggaagtatacgatatggcgatcgacggaagaaaccgcagatactacaagattacggaaaagggcagagtacagctgaagctgtacaaaggtgagtgggcaggctactcccggaagatatctcaaatctttgaggaggcattcatatgaacagggaagagtttatgaaggagctggaatatctgctttctgatattccggatgaagaaaaggcggaagccatcggctactacagagattatctggaggaagccggagaggagaatgaggaggcggcaatcagggaattcggaagtccggagcgcatcgcggcgattatccgttccgatttatcggggcatctggaggacggcggagagtttacggataaaggatatgaggacgaacggttccgcgatccgaattaccaggtggcgaagcggtatgatttaccggacgccgtggaagggccaaagacagaggaacgggaagaaaagagagagaatcagccgagaaccaaccgtacggtgaagcttatcctgtggattatcttaatcattgtggcggctcctgttctgtttggaatcggcggaggactggtcggaatgttcggcggcctcttcggacttctggtagcggcagtggtggttgtgggcgtccttacagctgcgctgtttatctgcgggattgcactgctgattgtgggaatcgtatcgatggtgattcatccgctaagcggagttctgatgattggcatttccgtactgacgctgggatttgcctttgcgtgcctggctttatgcggagcgttttatggtaagtttctgccgtttttgttccggtcgattgtgaacggaatcagtggtttgctctacggaaggaggagtcgctcatgaagaattttatgaaggtatgtctgatcgcaggcggcgtctgcatcctgatcggaggcggaattaccactgtggcggccgccatgggcggaaggctgtcggatttgccatcctggaattacagatggctcggccgggatattgtcggtgacatcactggcgacctccgatcagagatggatgatcttggccgtgacttatcggatcagtttgacgacagctttgatgaactggaccgggaatttgatgagattggccgccgccatgacggggtgaatgacggggaattgaacgagagtgaattttccgggatctatgcgagaaagctggatctggaggttcggagaggcagggcgtttatcacatatgacgccccggcggataagatcgttgtttccagcggggaagatatgtcacgctggaatgtctacagcgaagaggatgaactgaaggtaaccgttgggtccaagtcctgggattcctatgactatgaagatacggtagtctatatccacgttccggcggattaccgtttcgaggaggtcgaactgaaggttaaggcccagagaaacaacagggtgataaacagtaataacggccccgccattacagccgaggcgttaaaggccgacaagatagagatcgacgcggcagtaggggcggtaagtgtgaccggagccgatgcaggaaagctggaggttgattccgatgtgggagccgtaaaatttgaaggaaatgtagacggagatgtggacgcggaatgcagcgtcggcgctgtcaaactcgatctggcaggggaaaaggcggactttaactacgagatcaagtgcagggtaggcagtattaccgttgacggcgagggcttttccggactgtccaaggagagaaagataaataacggggcagcaaaaaagatggaactggactgcagcacaggagcgattgaagttaaatttcattgaagcaaaggaacacatacagggaaaacagagaggagatttaaagatggatgacagagagacgagaagattatatcgttcagatacagataagatgatttgcggcgtatgcggaggaatcggtgagtacttcaacgtcgaccctacgctgatccgcctcttatgggcggtgctggcctgttccggcacaggcgttgtggcctatttcatcgcagcaatcattataccgcgcagataggaatcgcgcggacaggaataccattcaggctccggctgcttttgcggtcaggagcctttttatggatcctgcataccgcattcgggccgccctgccattccgtaaaacagaaatccctccagtccggatgtttaggggggcttataacgggtatactctctttagattcgagaaaggagcaagcccgtaattatgtcaaaaggaaaaaagaacgaaccattcgatcctcacaatttaaaaccagaggaaatacttaaattcgaaattgccacggagttagggctcagtgacaaagtaatcaccggcggctggcgttcccttaccgcaaaggaaagcggccgtatcggaggtctcattacgaaacgaaaacgtgaattaaaacaggaggctttgggagaaaaataggtactatgccacaaagccaggggagcgcagacaggagaccgggtctgacgaacagacggcttcctgtctccccggcggcagctgcgggggctgtgaaatacggagttcatacagctctgtcttttctccaacccccgctttttattggaattcggtcagaatcaggcgctcttctttgatatcctgtggaaagcctgctgtttaaaaaaacttgccaccccaccccttatccattataatatacgggaaagaggaaaaggcaatggaagagagaaaactgagaagcggatttaccaccggaacatgcgctgcctgtgcggcgaaggctgccgcggtcatgctgcttaagcaggaagcggtggaaagcgttcaggttatgacgcctggagggacgagagcagaactgtttccggaggaagcggtgataacggagaactcagccgtgtgcgccgtcagaaaagatgcgggtgatgacccggatgtgacggataaggccctgatttatgcttctgtggagtacataaaagacagcggtgatccggagaactgttaccggaacgaccgcatctttttaaccggaggacagggggtcggaatcgtgacgaagccgggtcttgcctgccccgtaggtttttatgctattaatccggtccccaggaagatgatttttgatgaggtggaggcggtggcgcaccttgcgggctgtgaaggaggcctccttgtcagaatctggattccggagggggagcgtctggccttaagcacctttaatccaaagctgggaatcgagggcgggatctccgtgctgggaaccagcgggattgtggagccaatgagcgagtctgccttaaaggccaccatacagctggaactccacatgaaggcggtggaaggacagcgggaagtgatcttaacacccggtaattacggggagaattttttgagggagacgttaaagctttctctgtcccagggagtccagtgcagcaatttcgttcgggaatccgtattgatggcggcggacgaggggatggacgggcttctttttgtcggtcacatcggaaaactgattaaggtggccggcggcgtcggcaatacgcattcaaaatacggggacagacgcatggaaattatgtgggactgtgccaggagccattgcggaaaactgtcagagagtgacaggagccggttgaaagagcaggtgcttgactccaacacgacggaggaagcggtcaggcggcttaatgaggccggaatgttaaaaccggcgatggaaactgcggtggagcgtatcaggcattacctggaagtgtggtccgaaagaccggtccgcgccgaggtggtgacatttacaaacggttacggtatccttggaatgacccgcggggcagtggccatgatagatacgttccgcgtccgggagaaagcaaacgaaatacagaaagaacaggagaaacgataatgtctggtattctatacggaatcggagtcggtccgggagatccggaattaatgaccataaaagcagtcaggcgaatacgggaatgcacagtgattgccattccccacagatcaaaggagctgtgcacggcgtaccagatcgcgtgtcaggcggtgccggagatggagcaaaaggagtgcctctatcttcccatgcccatgacaaaggataaaaaggtgttggatgaaagccacgatctggcggccggcgccgtgatggaacggctggacagaggagaggatgtgggcttcataacactgggggatgtgagcatctactccacctgcagctatctgctggaacgactgtggaaccgggggtatgaggcgaggctggaatgcggaatcccttcattttcagcggcggcggccagacttggcataccgctggtgtccggagcggaggaactgcacgtgatcccggctacgtatcaggtgaaggatgcgctgaagcttccgggcgtcaaggtgctgatgaaaacgggaaaacagatgaagacagttaaggaagagattcgtaaatgcggtgccagcgccgtcatggtggaaaactgcggcatggccgatgagcgggtctttgcgtccttagaggaaattccggatgagccgggatattattcgctgttgattgtgaggtagagatggtacatatcgtaggagcggggccgggagcaccggacctcattaccgtccggggaaaggaactgatttcccaggcggatacaattatttacgccggttctctggtaaatccggcgctgctggagtacagaaaagaaggctgccgcgttctaaacagcgcatatatgacgcttgagcaggtaatcgaagcgatccgcgagaccgaggcagagggaaagatgaccgttcgcctacatacgggggatccctgtatctatggggcaatccgggaacagatggatgcaatggaacgtctggggatttcctatgaagtctgcccgggcgtcagctccttctgcggcgcggccgcggccttaaacatggaatatacgcttccggagatatcccagagcgtcgtgatcaccaggatggcgggaagaactccggttccggagcgggaatccgtcgcttcttttgcggcgcatggggcgaccatggttctcttcttaagctcagggcttctgacagagctggcggaagaactgatgcggggcggatacggggcggataccccggcggccatcgtctaccgggcaacgtgggaggatgaaaagaaggttctgtgcaccgtgggaacactggaggaacgggcagccggcgaaaagataacgaagacggccctgatcattgtgggaaacgcggtgagccagagcggatatgccctctcgaagctgtatgatccgggattttctacggaatacaggcaggggagtgattcggtgggagccgaagggcaaaaagaggatgaggtatgaggctgtcgctgatttgttttacaggagcaggggcacaactcggcgcccgtctgttaaaggaattaaagttcagcggtcatgagtgccgcggttttgtgctggagaagtttttaaatccgtttcatgaggcaaacggtctggaaccgttaaaaaccccgctccgggaatggacgggggagcagtttacggcacgggacggattgatatttatcggggctgcagggattgcggtcagggcgattgcaccgtgggtgaaggacaagaggacggatcctgccgttgtggtgatcgacgattgcggcaggtactccatttcccttctgtccggccatctgggaggggccaacggtctggcggaagagacggcaaagattacagggggcatccctgtgattaccacggccacggatcttcacgggcgctttgcagtggataactttgcaaaagagcatggactctggatgtccgatatgaagacggcaaaggcggtgtctgccgatgttctggccggtgagccggtgggcctgttcagcgatttcccggttatgggaagcctgccggaaggatttacccagaaggaaagctgcaggaggaatgtctggattacggtgaagcgtgagccggaggagggcggtttcctgaagctgtttttgccggaaggcggggaagtgctgcggctggttccgcggattgtaattctgggtatcggctgtaagaaggggacggggaaagagcagattgaagcggccgtgggggaggcattgagccggtggaacattgaaccggagagtgccgccgccgtggccaccatcgacataaaaaaagaggaagccggactcctttcctatgtccgggaccatggcctctcctttcacacgtacccggccggacggctgctgcaggcggagggagaattctccccgtcttctttcgtcagggagatcacaggcgtggataatgtctgtgaacgggccgcagtaagcctggcgaaggacttgggcggaggcagactgatgatgaaaaaacaggcgggcggcggcgtcacggtggcggccgcagtccgggattggaaggtgaagctgtgaatcagacaggaaaattatatgtggtgggaatcggaccgggttcctatgagcagatgacgatcaaggcggtccgcgccctggaagagagccgagtggtggtcggttatacggtgtatgcagatctgatgcgggagcatttccccggaaaagagtggatcaccactcccatgagacaggagacggagcggtgccgtatggccattgaaaaggcaagatccggcctgacggtggcgctgatctgcagcggggatgccggcgtatacgggatgagcggcctcatactggagctggtgggagaagaggattctccggctgtagaggtgattccgggcgtgactgcggcgttaagcggcggagccctgctcggcgcgcctctgggccacgatttcgccgtgatcagtttaagtgatttacttacgccgatggaactgattgaagacaggcttttccatgcggcaaaagcggattttgcggtgtgtctctacaatccatccagccggaagcggtcggattacttaaagcgtgcgtgcgaaataatgcttactgtcaggaaaccggatacggtctgcgggattgcgaaaaatatcggcagggagggagagtccatggaagtgatgacgctttcacaattaagagatacccccgccgacatgtttaccaccgtgttcatcggcaatgagaagacaaaggtgataaacggaaagatggtgacgccgagagggtaccggaatgtgtaggatcctgatcttcggaggcaccacggaaggccggcttcttgccgaatactgcatgcagcaggaaatcgccgtctgtgtcagcgtcgtcagcggctacggggcggacttactgccggaaagccggctgattcacgtgatctccggtcggatggaggagaaagagatggaagaattcatgagccgggagtccatccgaaccgtctttgacgcgacccatccgtatgccgtggaggcaaccgtaaatataaaggaagcctgtaagcgttccggagcctcttacgtgagggtggagagggaatcggcggcagagaatggcggaggcggccgtgaagcatctgcttctcaaaccgtctatgtggattctgcctctgaggccgctcgctacttaaaggacagagagggagggattcttgtgactacgggaagcagggaactcgccgcttttacagccatcccgggatatgaggaccggctttttgcgcgggttcttccatccgctgccgtgatctgtgcctgtgaggaacttggcataaaaggaaaacatgtgatcgccatgcaggggccgttttccgaggaactgaaccgtgccatgatggagcagctcggagtccgttacctggtaaccaaggaggcggggacggcaggaggatttctggaaaaattatctgcggcttctgcactttctgtgaccacggttgtgatcggaagaccgtcggaggatagagacggagtctcactggaggaggcgaaaaagcttctgatggaaagcaagcttcagacatgctctatggcaggaagcgaaaacacttctgccaaacggaaaatttctcttatgggaacgggaatgggaggcagagggcagatgacgcttgcagttgcagaagaactgaaacggtgtgacgttttattcggagcgaagcgcatgacggaagcagctgaaacgctgggggcaccggcagacggaatcctgcgcatccccatttacgggaaccgtgaaattctggaatggcttgagaaccatccggagtatcggaatgccggtgtcctgtattccggtgacacgggattttacagcggtgcttccggtatggcagccatgcttttgcaggaaccgtattgcgatatctatgattattgtatttatcccggcatttcctccgtatcgtacctgtgtgcgaaaatggggcgaagctgggagcaggtgaagctgatcagcctgcacgggcgggactgtgatgtttccctggaggtttcccaaaatccggccgtattcacgctgctgggcggggtacatacggttaaggaactgtgtgaacagcttttaaaccatggcctttccaatgtgagaatgactgtgggagagaggctgtcatactccgatgagaggattgtggcgggaacgccggagcagctggcagccatggaatgttccagtctggctgttgttatgatggaacgggatgaagggagagaagggaccagatgagagacgagtggtttatcaggggagaggtccccatgacaaagagcgaggtccgcgccgtctcggtggagaagctggagctttcggctgactcggtcctctatgatatcggggctggaaccggctccgtgtctgtggaggcggcggcttttcttccggaagggacggtttatgccattgagaaaaaacgggaggccgtggaactgctgaaaaaaaacagggaaaagttccgggcggagcggatacggatcatagagggcgcggctccggaggctttagagggactggaggcgccgactcatgcatttctggggggaacctccggtaaaatggcagatatcctttctctgcttctggagaagaacccggaagtccgggtggtggtaaatgcgattaccctggaatctgtttcgaaggtcttagaatggactgccggccgcggcatagaggctgatatcgttctggtgtcagtttcacgggcgaaggcggctggacgggtccatatgatgatggctcagaatcctgtttatgtgatttcctttggaggcagaccggcacagctttggaatgcgccggggagagcagaaagagagacaaaaaatacggaatatccccgtcttatgcttgccgcgccgaaaagcggaagcgggaagacgatggtgacctgcggactgcttgcggcatggcagaaaaggaaactgaactgccgggcgtttaagtgcggccctgactacatagatcccatgtttcacaagtatgtgctgggaatcgacggcggaaatttagataccttttttctgtctgaggaagcggtgcgaaatcagtttaaagagcttgcagccggtgcggatctttcggtggtggaaggtgttatggggtattacgacggagttggaggaaacgatacgtgggccagctcctacgatacagcccgtaccatcgacacacccgtagtgctgatcctggacggcaggggagcgtcactttccctggcagcggagataaaaggattcctggaatataaaaaagacagccgcatacagggcgttattctaaaccgggtatcccgtgttatggcggagcgccttgtgccggagatcgaaaaaatgggaattgccgtatatgggtgtctgccggaatgcgatgcggcgaaagtcaccagccgccatctcggactggtgattccggaggagtcgaaggcattgcgggagagcctcggcagactggcatgtgagattgagaagaatgtggacgtggaaggacttttccggctggcatgcggggcaggaacgctgcaggacgacggttacagggcatcaggcggcaccgggcatgaacccgatggcaaaacggcagacagaaaaccagagaagcatgaccgtgtgcccgccggcccggatcgtgtccggatcggcatcgccagggatgaggccttctgtttctattatcaggagaatttaaagctttttgagagtctgggcgcagaatttgcagaatttgatcccatgagggatgagcatcttccaccggggattgcgggactgatgtttggaggcggctatccggaactctatgccggagaattgtctgccaaccgcccgattttacaggaaataaggaatgcggcggccggcgggatgccgattcttgcagaatgcgggggctttctctatcttcatgaggaactggagacgaaagagggggaggtctttcccatggcgggagtcatctccggccgggcatatccaactggaaagctgtccagattcggatatatcgagcttgtcccatatggggacaccccgcttttgaaagagggagagcggatccgcggccatgaatttcactactgggacagcacggcatgcggaaccgatatgaaggcagtgaagccggggggaaagagaagctgggactgcatccatgcaaacggcggtttcctggccggttttcctcacctttattacccgtcaaatccgtctgccgcagagcggtggctggagctatgcaggaaaggaactgagtgatgacagaagaattgaacatacggcagggcgttttaaaggacattccggaactggtccggttatacgaggagacggtagaacacttagagagccatgtcaactatccgggctggaaaaaaggcgtctatccgggagaggctgcggccgaagagggcgtaaaaaccggtacactctatgtggcagaggccggaggccggatcatcggttccatcattttaaatgaaaaacaggaagcggcatacagcgaggcctcctggagcgtggatgcggctcccggggaagtgatggtgatccatacctttcttgtccatccggattttcgcagatccggcgcgggaaaactgctgatggattttgcggaggtgcaggcactaaaggaaggaaagaagacgatccgccttgatgtatacgagaagaacgaacctgcagtcaggctctatgaacggcagggctaccactatactgcaactgtggatcttggactgggatccaggggccttccctggtttaagctgtatgagaaaacggcgggagagtgcttatacggcctgttatcacggatttctccgctttcctccgaggcgatggagcttgccgcacttacctggagccatgtggcgaagccgctgttcagtctggggatactggaagaggatgtgataaagatcgccggaatttcaagcagtcccagcgtcgatattggaaaacgggctctgatcatcatgtgcggcgacaacggtattgtggaagagggggtgacccagaccggtcaggaagtcactgccgtggtaactgaaaatatgacggatggaaacagcagcgtctgccttatggccgagagggcgggagtggatgtgtttccggtggacatcggagtctgcagagagctgcgttccggtaccaggaatccgctgatacgaaaaaagctggcttatggaacaaagaatttccgaaaggaaccggccatgagccgggaaacggcggtctcggccatcgcagcaggactctgcatggccggggaactgaaggaaaaaggataccgcctgatcgcaaccggagagatggggatcggcaataccacgacgagcagcgccgtggcagccatgctgctggggcgtgatcctgctgaaatgaccggacggggagcggggctgtcggatgagggcctgaggaaaaaagtgtctgtcatccgggaagccgtgaaacggtatgaagcacaatgccgtgatgccatcgatgtgattgcctgcgtgggcggcctggatctcgctggccttaccggcgtctttttagggggtgccgtgtaccggattcctgttctgatcgacggatttatctcgggaaccgcggcgcttgccgccgcaaagctggcgccatccgcctgtgattatatgctggctacccatgtttcggcggaaccggcgggaaaaatgattttagaggaactcggattaaaaccgtttgtagcggcagggatgtgcctgggagagggaacgggggcggtagcatcgatcccgcttctcgacatggcgctggaggtttatacgaaaatgagcacatttcaggatatccggattgaggagtacaagcaatggtaaccctggtaacagggggaagcggcagcggcaaatcagcctttgccgagcaggagatcgtgaagcttggaactcggagacggatttacattgcgaccatgaagccctgggatgaagaatgccgccgccggatcgaacgccaccgtgtgatgcgggcggacaaacagtttgagaccatagagtgttaccgcggtttagacaggctggaactgcctgccgcaggaaaagagggggaggcaggaaatgccgttctcttagaatgcctatccaatctggtttccaatgaactgtttggaaccggagacgatgactgtccggaccgtctctcctcccaatacggttctgcgacagcggatctggtggtaggcggaatcatgaggctgatgagacaggcggacgatctcgtaatcgtgacgaacgaggtgttttctgccggtgattaccgcagaaatccaatcggtgagaaccggcatgaaggagaaaaccggtatgagggcggaaaatgtccggagtcaggggatttcagcggctgggatgagtccacagcactctacttaaaggttctgggagaagtaaactgccgcctgggagccgctgcagaccgcgtgacagaggtgacagccggaattcccgtgattattaaataatcatgtcatacagctgtcgtgtttaccatgctatactaaagcatgtttgaataaaggaggaagcagtatgacagcatttgattataaaaaagagtacagggcactctatcttccgaaagatacaccttcggtcatagatgtcccgccgatgcagtatgcggcagtgagaggctgtgggaatcccaatgaggaaggcggcgagtatgggagagcgattgcagttctgtacgggatatcctatacgattaagatgagctataaagggagccggaagattgacggtttcttcgagtacgtcgttcctcccctggaagggttttggtggatggaaggcggtgcaccgggcgttgattacaggaataagtccggatttaactggatctccatcataagagtgccggatttcgtcacggaagaggtgttttcctgggcgaaggaggaggcgcagcgtaagaaggggatcgatatgggaccggcagaactgatcacggtttcagaaggccggtgcgtccagtgccttcatatcggaagcttcgacgaggaaccggcaaccgttgcgaagatggaccgctatctggaagaacacggttatgtgaacgatttctccgagacccggcgtcaccatgagatatacttaagtgacccgaggaaggttccacgggagcgtatgaagacggtaatcaggcatccggtgagccagaacagcataaacgattaagggagcgaataagatgatagtcatggtgtgtatcgatgatcataacggcatgatgttcaatcatcgccgccagagcagagaccgtgcggtgattgaacgggtgcttcgatgtgcagagagcagcagactctggatgagtgagtattcttaccggctgtttccgggggagagccgggatcagctggcggtcggaccggattttctggaaagggcaggacgcggggagtactgttttgtggaggacagggatattctgccctatgaagcagagcttgaagcgatcgttctgtttcgatggaaccgcagttatcctgcagatttttatttccctgtggaaatcctgtctcgcgggtggagtatgacagaatccgaggaatttgagggaagctcccacgaaaaaataataaaagaagtgtataaaagatgaagagaataaggacttatattgcagttttattgatggcggcactgtttctttccgggtgtgcgccggcgcctgttcagacggacggaagcggttatacagccggagttttggcgaatgagacagagcttgtgggaagcacggggccaaagcagttttcagtatcggatattcctgtcttttcgggtgcggcgtatgctgcagtaaacggtaatatcccttacttcgaacagtcggattattccacggaatcatttgagacttacagtgatttagacagccttggaagatgtggtacggcttttgccaatgttggcacagacttaatgccgacagaaaaacgcggttccatcgggcaggtaaagccctcaggctggcagactgtgaaatacgatttcgtagatgggaagtatctctataaccggtgccatttaatcggctttcagctgaccggggagaatgccaatgaaaggaatctgatcacgggaacccggtatatgaatgtggatggcatgctgccgtttgagaatatggtagccgactatgtcaaggagacgaaaaatcatgtcctgtaccgtgtaacccctgtttttgaaggggataatctggttgcagacggcgtcctgatggaggcggaatccgttgaggacgagggcgatggaatcttattctgtgtatttgtctataatgtccagccgggagttgccatagactatgcgaccggagacagcagcctgtcagaggacagtaatacagattatcatgccgatgctgccgggcagcaggagaatacttatattttcaataccaatactcataaatttcacgatccttcctgttccagtgtttctcagatgaatgaatcaagcaaacaaagcttcaccggaagccgggaagaggcgatcgcacagggctatgagccttgcggacggtgtaaaccttaataaacaaatgctgtgccgttgtatgatgataaccggatggcaggaacatgagtttgaacataaaacatgaaaaattctatagactttatacgcttgaatatggtataatatacatgaatacatgttaacggaaaccgataattggattggcaaagtacgattcagtttactcatatggaggtgtgcatatgacagacagcgaaaaacttgatttgctcctgctcaaaatggaggggtttgcgacaaaagatgatttgaaatcctttgcgacaaaagatgatctgaagtcgtttgcgacaaaagatgatctgaagtcgtttgcgacaaaagacgatttgaagccctttgcaacaaaagacgatttgaagtccttcgcaacaaaagacgatttgaagtcctttgcaacaaaagacgatttgaagccctttgcgacaaaagacgatttaaagtcgtttgcaacaaaagacgatttgaagtcctttgtaacaaacgatagcctgaggcacgaaatgaatttgatcttatcagaaatagattccacagagcagaggcttaaccgcagatttgaagaggtcgataaaaaaatactggatctgcgtaattatgtgacatccatgcgatacagcagtgaggctgtggaaattcttatgaaacggcaggataatgtagagcagagattacaaaaagtggaaagaaaggtcttatattcataagctgaccgttccttcgaggctaattttgtaaaaggcagaaaaacaattgaaaatattgccaggccgtgatatgctgttactgtatcctgacgctgaaaacatgttttgaggtgaaaggttcggcttgagattaagaaagataacatggagtgcagagagcattctgttcttgccgtacctttttggggtacggcatttttattttaacaaaacaggcgagaattcccccgcctctgcagggggaggaatgagacgccaggaacaagcttaacggcagtggcgggcggagagaaaccggtatcccccactgacatgaagtattataaaatcccggaggtgttacgatggaaacaagaatcgcagtagtgggaattgtggtggaagaggaggaatccgtggaagaactcaatgaaattctccatgaataccgccagtatatcatcggtcggatgggaattccctaccatgaaaagaagatcagcattatcagcattgcagtggatgcgccccagagtattatatcggccctttccggtaaggtcggaaagctgaaaggagtcagctcaaaaactgcttattcaggagtaaagtcatgattaggagtaaagtcatgagtgagaccgcgggaaagatcatggacccggccgtacgtctggcggagcatcacgatctgccggatgaggagttatacactttgatcacggagcgtgacgaagcgacggcacagtttttgaaacaggaagcaagggcgctgtgtgagcggatgtatggacgcgtcgtttacattcgcggactgatcgaatttacgaattactgcaaaaatgactgctactactgcgggatcaggagaagtaaccgggaggcggagcgctaccggctgacagagaaagagattctgtcctgctgtgaagccggttatggcctggggtttcggacgtttgtgctccagggaggtgaagatccctactttacggacgagcgtctctgtaccatagtatcgtcaatccgtcagcggtttccggactgtgcgattaccctgtcggcaggggagcgaagcttcgaaagctaccagcgtctctatgacgcaggcgcagaccgttacctgctccgacatgaaaccgctgatcgctgccattacggaaagcttcacccggagtctatgagctttgatcatcggatggcagcacttagggatttgaaggagatcggctatcaaaccggatgcggctttatggttgggtcaccataccagacggcggccatgatggttaaggatctgcggtttatgaaggagttcggtccccacatgatcgggatcggtccgtttctctctcataaggacactccgtttcgcgacaggaaaaatgggactgcagaacttacactgtatttactgtccatcatccgtctgatgatgccgaaggtgctgctaccggccaccacggcgctggggaccgtgacagagggcggcagggaagccggaatcttaagcggggccaatgtggttatgccgaatctgtccccggcaggcgtccgcaaaaagtatatgctctacgacaacaagctgtcctccggctccgaggctgcggagagcctgaatcttttaagggaatccttaagtaaaattggttatgggattgccgtctcacgaggcgacagtcttgtaatataaaaattatgaactgacggaaaagcactcgctgacccggaagaaaggaaggaatcatgtataatccagaatcattaaaagcggaggaatttatctcacacgaggagatcctcgagacacttgactatgcggaaaaaaacaaagaaaacagggaactgatcgactcgatcatcgaaaaggcaaggcagttaaagggattgagccacagggaggcctccgtgctgctggcctgcgagatgccggataaaattgaggaaatgtatggcctggcggaagaaatcaagaagaaattctatggaaaccgtattgtcatgtttgcccctctctacttatccaactactgtatcaatggctgtacctactgtccgtaccacggaaagaacaaacacatcgcccgcaaaaaactgacgcaggaggaagtggcaaaggaagtgattgctcttcaggacatgggccataaacgtctggctattgaggcgggggaagatccggtgaggaatcccatcgaatacatactggaatgtattgataccatttattccataaagcataaaaatggagccattcgccgtgtgaatgtcaatatcgccgccacctcggttgagaactacaggaagctgaaggacgcgggaatcggcacctatattctgtttcaggagacgtatcacaaggagagctatgaagtgctccatccgacgggaccgaagcacgattacgcctaccataccgaggcgatggaccgggccatggagggcggaatcgatgatgtgggccttggggtactgtttggactggaactctacaaatatgaattcgccggtcttctgatgcatgccgagcacttggaggcggttcacggcgtgggacctcacaccatcagcgttccgcgtatcaagcatgccgacgacatcgatcccagcgcatttgacaacagcattagcgacgacatctttgcaaagctctgcgcactgatccgtcttgccgtgccatatacgggaatgattatatccacgagggagagccaggaggtgagagaaaaagtgatccgcctcggcgtatcccagatcagcggcgcatccagaacgagtgtgggcggttatcaggaagagattcgtccgaccgatacggagcagtttgatgtttcggatcagaggagtctcgacgaggtggtccgctggctgatggagatgggatacattccgtccttctgtaccgcctgctatcgggaaggcaggaccggagaccgtttcatgagcctctgtaagagcggacagatccagaactgctgtcatcccaacgcactaatgacattaaaagaatttctgatggattacgcttctgaggatacgaaggccattggagaaaaactcatcgaagcggagctggccaatataccgaaggataaggtgcgggagatctgtaaggatcatctggatcagattgaacagggaatccgtgacttccggttctgataaggtgcggtccgccggaacggcaaatttggaagaactgtggggtgaagaatgatgggacttaatgatacaccgggtggagagcgcctccacatcggcttttttggccgccgcaatgcgggaaaatccagtattgtaaacgcggtcacgggccaggaactgtcagtggtctctgatattaaggggacaaccacggacccggtctataaatccatggagctgctgccgatgggccctgtggtgattatcgatactccgggctttgacgatgagggcgctctcggagagctgcgtgtgaaaaagaccagggagattttaaaccgggcggactgtgcggtgctggtggtcgattctcttcagggaaagacgaaggccgatgaagagctgctctccctgtttaaggaaaaagagattccttttctgattgcctataataagtgggatttgctggagaagaacgagtctcacggggggcaatgcacggcagaagaactgacagaagagaacggtatcacggtcagcgccgaaaccagctaccacatacaggagttaaaggaaaagatcgccggccttgtaaaggagaaggaacatggctgccgcctggtcggtgatttcttaaaaccactggatcttgtggttttagtggtccctatagataaagcggcgccaaaggggcggctgattctgccccagcagcaggccatccgggatattctggaggcgggcgccctgtccgtcgcagtgcgcgacacggagctttcggccgcgcttaagaaactgggccgggatccggatctggtcataacggacagccagtcgttttctgaagtggctgcggtggtgccggatcatgtgctgctcacttcattttccgttctgatggccagatacaaaggctttctggagacggcggcaagcggagtgaaggccgtggaccggctgcaggatggggaccgggttctcatatcggagggttgcacccatcacaggcagtgcaatgatatcggtacggtaaaaattccggcctggattaagaactatacaggtaagaatgtgatcattgaaacttcctccgggcgaagctttccggaagatctgtccggttaccgtctggtgattcactgcggcggatgcatgctcaatgaaagagaagtcagataccgcatgaaatgtgcgggagatgcaggcgttccctttacaaattacggtatggtcatcgcacagatgaagggcatcctggagcggagtctggaaattttccaaaaggcacggtgattgtttcggggaaaagcatgtccggttatgaataaaaactgagcaggaacgttaacgggatcgccgttagctttcctgctttttgatatcacggaaataaatggaaaaaaataccataaatggagttttaggactactcagcgtgagttccaaatactgattatttcatgtaaaataataaaagaagtattttacatcaggaaggatttattttacatgaacgataacagaagtaaaaatcagccgcgagtacggaattttccattagaacagaccgaagagaagggcccgggacgcgctgcgaagggcggacgaaacaaagaggagctgctgcgcgaaatgggaaaccgcttaaggcagatcagactggaaaaaaactggactcaggataagatggcggaatgtctcggtattacgaaagcgttctatggaaaaattgagcggggagagagcagtattgccctggaaaaactggctctgttgaatgagaccatggatattgacttaaattatctgataacaggtgagacaattcctgtacttccgattaattttcaggacgttccccgcgagaagcggtacagcatggaacagctgatcaagtacgctgtcagcctggcttcatcgaaggaggagtgagggagaacagaccatttgccggagacgatgaagaccatctggcggtcccctcttaaattttgtaaggaggcagctaaaaaaattacagataatttactaaaaaagtttatttactaaaaaatttgaatacttaaaattaatggattgacaagaaacgacattattgttatactaatcccaacaaatgcaaagaagcagaaaatggagttcattttctgcattttttgtaaatatttgctttagtgaactaaagtgacggtcataggaggattagttatgagaaaacgtagaagtgtacttgcagcaatattactgtcagcgatggctcttacaaccgcatgcagcggaggcggcggtacgacagagacgaacgggggcggaaccgttcaggctgaagcgggatcggaagcgggaaatacgggggaagaaaccgtggtgcagattggccagacctctgaggtagccaacttaaacccgacgattcagccgagaacaccggacagcaatgttcagtgtatgatcttcgattatctggtaattccggatgaagaactgaactatgtaggggctctggcggaaggctgggatgtgtcggacgacggcaggacgtacaccttccatttgagagacggcgtcaaatggcatgacggagaaccgtttacttctgcggacgttgcatttacactgacatccttagcggcaccgacctacaagggcggcgcggacagccgtatcgtctccatcgtcggcgccaaggcgtaccaggagggaagcgcggacagcgtctccggcattacgacaccggatgacaagacggttgttgtggaactggaagaggcgaacgccgcatttatcggaaacatgtatacgtgtattctgccgaagcacattctgggagatgtggatccgggcacatgggataccgacgattttaaccgtcacccgatcggaaccggcaagtataaattcgttgagtggaaatccggccaatacattgaactggagaagaacgaggactacttcggtgcaaagccaagcattgaccgtgtctatgtgaagtttggtgatgagactacactgacggcgtccctgatcaatggcgagctggatgtactgtacggcttaagcgcttcagagatcgagaccgtagaggcgatgggcggagtcagagtggaaacgtatgatatgttaagcgtatattatatcggcttaaaccagttaaatgaagatttaagcgatttaaaggtacgccaggccctggcttacggtattgacaaagccaagattgtagcgaccgtctatggggagagcggctacgttcaggacagcatcttcccgagcaatcactggacctacagcgacgatgtgacaaagtatccgtatgatccggcaaaagcaaaatcccttttggaagaggccggatacaccatgaacgcatcaaccggattttacgagaagaatggaaaaacacttcatctgacctatgatcttgtaaccagcacggacggcaattccgttgcgcagctgatccagcagcagtggaaggaaatcggcgtggagatggagatcatcgagcaggatttttccacactggcttatacgaagctgttcccatctgatgacagcggcagcccgcgccgtgtaacggcagacgattttgcctgctacaccttaggcttcggcatggaggccgatccggacgagtatagaatgtacttaaccacagctgatgcgccaggtacctggaacttcgttacatacagcaatcctgaggttgatcaattattcgaaaagcagctctacagcacaaagcctgaggagcgagcagaatgctaccatgagatcggcaagctgatttccgaagatgtgccgtggattccgttatacggtaagaagagccttgcaggagtcagcgagaaggtacagaactttgcagcagatttccgtggaattaccttccagatcgaaaaatggagcgtggctcaataaagtctaaaatcccgctgcctgcggaactaaatgaatgaggtgaaatggcccaaagcatattgttttgggccatttcaccaatggagaggcaaatgaaatacgattatacagaagttttaaaggatctggtcagaatcgataccacaaatccaccgggaaatgaaaaaatggcgcttgattacattcagcagattcttgaacaggaagggatcaattcgaagatttacgagagtgctcccggcaggggaaatctcctggcctgccttccggcttccttccatatggatgagggcgccggacctgaccgggattcggctgaggatgaagcggcggaccggccgctgattcttatgagccatattgacgtggttctggccaaggagtcccagtggaagcatccgccctttgccgcggtggaggaggacggttatatctacggacgcggcaccgtggatacgaagcagctgacggtcatggaactggcggcttttctggcgctggcggaaaatggagaatacaggaaacgggatgtcttccttctggtgacctgtgatgaggagagcggcagcgcctgcgggctttccgcatttctggaggaaaccatcccggcaggaagctgtcccatcacaggaagagagctctttgaaaacagtgaggtaatcagcgaaggcggaggcttcccgattctggtgggagatacggctttttacttatgtgagtcggggcagaagggatgcggcaccgtggaatttacggtggcggccagactggcaaaagggccgttcttcggaagcggagatgggatggtaagagccatgaagctggtggccgatatcgggtccatggaactggagcagaggaagctgcctacggtcgcgcactttgaacaacggctttcccaatgcgtggacggcggcagtcacggtgaaccggatgcagggcaggacgccgctcgtctcggagaggtactttccccggttatgaacaatattttaacggccatgaaccggaataccatgaccgtaaccatgatacaggggaaaaacagcagcgaggtgaaggtgatctgcgatgtgcggcttctgccaggttacggaaccgaatatctgaaagaacttacggacagtctggcggaaaaatgggatgcggactgccggattttatccttcagcgagggctatgaaagccagccggaaggcgggctgatcggctgcctggaggaagcgacaaggatggagctgggagaagccgggaaacgggcggagctgcttccgttcatttccatgggatccagcgacggccgtttcctggtgcccatgaaggcgaaggtatacggctacagtccggtgcttccctgggatatgacctttgatcaggccgtttccatggttcacggcgtcgatgaaaagattcatcgggaatcggtgctgtttggatgccgggttcttgaacgtgcagtccgtcaggcagtctgcggcagtcacggtgaatgaataattgtaaaaaaggaagaaggggaacattatggtagacagaaaaaatgtagcggttgagaagatggaccgtgcagtccagattttaaaagaaaatcagatcgatatgtggatgttttattccaggcagaatcaggatccgtcgctggaactgatgttcaataccgatacgaagaatgaggtcctgtttgtgctgacagcggatggagaccggatggcatttgcggaagcgtccgatgcggcggtttatgaagcctccgggatctttacctgtgtgaagacggtgacgccggacaccattatgaaggaatttacagcagtatgtgacgaaaagaagccaaaccggattgcggtcaacgactccaccgaggattcccgctgtgacggtcttgggctggggctctataaaaaagtatgcggcgcgctgggggaggaccgcatgaaggcgttaaagaccggaagctaccggatgctggaagaactccgcgcggtaaagactcccagcgaggttgccattatggaggagtgcagccgtttgacgaccgatatatacgacgcactttttgaacgtctccatgtaggactcagtgaaatcgatgtgggagagatcatgatggaagagtgtgcgaagcggaacgtagtcaccgctttcggaaatccgccggaatatccgctggttcttctcgtcaagggcggcatgtcccacaggaagccgaacgcgaagaatatctgcatgccgggtgatatgctggtgatcgacttcagcatccgatttaacggctatacctccgatattgcgcgcaccatgtacttcttaaaaccgggcgaggagcatgctccgaaggaggtcaccgactgtgcaaacggggccatccgcgctgtcggtgaggtcatgaaggtgatcaaaccgggcatgaagggctacgaggtggacgcggttggaagacagtccattctggacagcggttatcccaatattcctcattccgtaggccatcaggtggggttagaagtgcacgacggcggaacgaccctcgggccaaacaaggccaaggtcagctgccagggcgttttaagaaagaatgagatctacgcgctggaaccgaccgtacttcagccggatggacttccctgcgcgatcatcgaggatgatgtaatcctgaccgatgacggatgcaggctcatcagcaaacgccagactgcattaatcgagattccgtacagagaggcttaattcatggataatgtgaaagagacactgattcatctcatttctattccctcggtaaccgcttctccctccgagaaggaagccatcatgtacctcgaagagatcttaaaggaagagggaattgagacagagcggatttataaggatccggaacgcttaaatcttctcgctcatttaccggccgagaagccggaaaaggagccacttgtgctgatatcccatgtcgatgtggtggatggtgatgctgacaaatggaactggccggtgttcggcggagtggaagacggaggcaggatctatggcaggggaacgctggatacgaagcatttgaccgtgatggagctgaacgcgtttctgaacctgaaacggtcggggcggaagctgaagcgcgacgtctatttcctggcaaccatcgatgaggaagcgggaagtacattcggcatggagtacgtaaaagaggcaaaaccggacctgtttgtgcatgccgcggtcatcaacgaaggcggcggttttccccttcggattaacggaaaagactatatgatggtgacggtgggagaaaaggccgtgtgcaaggtaaagctttcggcttcgggacgcggcggccacgccagcgcgcccggcggcgatcaggccattttaaagcttgccgccgtgctggaggaagtctttggcgcggaggaggagctggactttggaagccacgcgacacaggagaccatggcgcggattctgggaagccgtgactgcgacaacccggtggcagccgacattttcgggtattctggccagaataccatcgggctccgggattaccggattggagaccggagcaatgtgattccggctgcggtggaagtggttctggaatttaaagtccttccgggaacccgggtagaggagattgaagcgtttataagacgccacgtaacggatggggtacagtatgaaatcatgagctttgagagaggcttcgaaagcaatttcgacaactctgctctaaaaagcgtgatcgaggacttaaagactatcagcagtgaggaagggttctcctgtgaggtccttcccatgcttgcgctggggcgcacggatggccgctttttcggttcggaaggaagtatggtttatggctgctcccctcttctgctggacgactcctttgacgtagtgctgccgaaggttcatggaaatgatgaaagcatatccacggaatcctatctctttggctgcagggtgctggaccgtttcattgagaaaaactgtttgtaagccgtgaaagagcggcctgctattacataaaatggaggtaaaaatgaagaactttgaatttcataatcgtgtgatccatgatgtgactgaaaaactgaaagaactggacattgacttgtatttaatcattaccagcgaaggaagcgataagatgacccggtttattcccggagtcgataccgtaggatccggagcatttttctttacaaaggaaggaaaacggtacggcgtggcatctaccatagacgctcaggacgtggaggaatccggcctgtttgacgaggtagtccgttaccaggattacgaaagcgcggtagccggccttctggaacggctgaatccgaagcgtgtggcgcttgatttttctgagacggatgcggaatgcgacggactgacgctgggacggtatgaacattataagtctcacatcaaggggcagatggagtatacagaggtcagctccgatctgtttatcccacaggtgaaggctgcagtccaccaataagatcaggaggttatcgatgggaaaatacataagaaaacggttaatacagtcaattcccgtggtgttcggtattacaatactgacctattttatcatgaaactggcgccgggcggccccctggccaacatgattaatccgcgtacttcggcggaatccatattgagggccaaggaagcgatgggcttaaataagccgatcatcattcagtatgtcaactggctgagagagctgctgcaggggaatttcggttacagcaccaactcaggccagcaggttcttgccatgatactggaacggcttccggcgacgctgctgctcacggtaactgcgtttgttttaagctttgtcattgggataccgctgggggtttactcagcaacccataagtattcggccggagattacggcctcaccattttctcctttatcggaatatcgattcccagcttcttcttcggcatgggtttaatctatatctttgccattaagctgaaatggtttccgacgtccggatttggcgataccacctttaagggaaccgggatggccctctttctcaacaagatgaaatacttagtcatgcccgctctggtgatgtccctggccaatttagccacggtcatgcgctttacccggtcgagcatggtggaaacgctgaatcaggattatatccgcacggccagggccaaaggactttcggaaaaggtggtgatctaccgccacgcactgaagaattccctgattccggttatcaccatcttcggcttatccattccgaacctgttcgggggcgcctatatcacagaaaaggtgttcagctggccgggtatggggcttttgggcgttgacgccatcgcaaacagagactacgcggtgctgatgggactgactctgtttacggcgattctggttctcgtgggcaatctcgtcgcggatatcctttattccttcgttgacccgagaatacgatactaaggaggcttccatggagaaaaaaattacatataaaagacggaccaatctcttcaaaacggatgcgtggaagcggttcagcaaaaataaactggcactgattggaagcatcatcattcttctcatgatcgcagcggccattctggcacccctcatcgttcagaatgatccgtacgtgtccttaaccgatgcaaacggccttattctgaaaaacagctctccggccaagagcggtacgatcctgggaacggacagcctggggcgcgacaccttcagccgggtgatctatgcagcgagagtctccatgagtgttggcgtggtggctgtcggcatttccaccggcatcggtattcttttaggtgcgctggccggttatttcggcggctgggtggataccttcatcatgcgtgtggttgatgtggtctactgctttccggtgctgttcctggttatcatcatcgcaacgatcttaaagcccagcatctataatattatgattatcatcggcctctgcaactggaccgggacggcgcggtttgtcaggggcgagatcttaagggtccgggaactggaatacgttcaggcctccatctcactgggggcgacggatggacggaccatttttcatcatatcatccccaatatcatggctccgattatcgtggaagccactcttcagatggcgagggccatcctgacagaagcttccttaagttatctgggcgtcggtgtccagatgccgacagccagctggggaaatatgctgatgagtgccaataacttatccacgctgacgctgcgcccgtggcagtgggtgccgccgggagtctgtatcttcctggcagtactgagcatcaattttatcggtgacggcttaagagacgcgtttgacgcaagacagaagaagtaactgcggaacaggagtttagatgaagaagacacaatatgaaaagaggctgtcgggcctcagagcttaccttgaggatcacggccttgcgggggccctgatcacttcgtatgaaaaccgcaggtatttctgtggatttacagggagcagcggttaccttatcgtcacacggacccatgtcgttctcataacggataagcggtacacgacccaggcgaaggagcagactgtggactgcgagatcgtggagcacagccaggaccggctgagactggtggcggacaccatgaagcgccttggaatcacttcctccgtcatggaaagcagtatgactgccggggaatatttttccctgaaggagtacttaggggaccacaggaccgtactggaggatgagtacttcctggaactgcgcatggtgaaggacgaatgggaaacagaagccgtaagggaggccatccggcgcgccgaggcgggctttgaccggctgattccccggctgaagaccggcatgacggaaaaggatttagcggatgaacttcattatctggtgaaccgggagggcgccgaggccatgagctttggaaccattgtcgcctccggggcgaggggagccatggcgcacggatttccgacggacaaggtcattgagaacggtgatatggtggtcgttgactttggagtcatgtacgacggttactgttccgatatgacgcggacgctgcttttcggcgatatttcccgggagaatatgagaattttcaatctggttctggaagccggaaaacgggccgtggaagcggtgcggccgggcgtgcacgtaaacgaagtggaggcggctcacagggaggtatttatcagagaggggctggatgactacgcgcttcgcggactggggcatggaatcggcctgcagatccacgaatgtccaagagtccagatcggaaaggacacggtactgaagccgaatatgatatttaccatagagccgggcctctattttccgggagtctgcggtgtgcgcacggaggatgacgttctggtgacggaaagcggagtggaaaacctttcccatacgccgcatgagattcatattgactaggaaaggagaccgttaatgagcttattggaagttaaggaattaaaaacatatttttacacggatgcgggctgtgcgaaggcggtggacggcgtatcgttctccctggataaggggaaggtgctgggcatcgtgggcgagtccggctgcggcaagagcgtgaccagcttatcgattatggggctggtggatccggtgaccggaaggcatgaaggcggggaaatcctgtttcacggggaggacttaagcaagctttcggaaaaagaacggcggaagattcgcggaaacaaaatctccatgatcttccaggaacccatgacctctttaaatcccgtgtttaccgtcggttatcagatcgaggaggcattgatgctgcatctcggtctggacaagaatgcggcgcgccagcgggcgattgagctgctgaagctggtagaaatcccggaggcggaaaagcgggtggatgagtatccgcatcagctgtccggcggaatgaggcagcgggtgatgattgccatggcgctgtcctgcaaccctgagctgctgatcgcagacgaaccgaccacggctctcgatgtgaccatacaggctcagatcctggagctgttaaatgagctgaaggataagctgggcatggccatcatcttcattacccatgacctgggtgtgatttcggagatggctgacgaggtggtcgtcatgtatgcgggggagattgtggaaaaggcggagacgcgccagcttttcgataatcccaagcatccctacacggaggggctgatggcctccatccccgatatcgatcaggaggtggatcgtcttcagaccctggaggggctggttcccagcctttacgatatgccttccggctgccggttcggcccgagatgcaagtattatacggaagaatgcggaaagaaccacagtcagttaaccaggctttcagaccagcgggaagtcagatgcaggaggtatgaacatgagtgaaatcctgattcaggcaaagaatattaaaaaatacttccccaccagtgacagaggcaaggttgtaaaagctgtggatgatatcagctttgatatttacaagggcgagaccctgggcgtggtaggggaatcaggctgcggaaaatccaccaccggccgtatggtcttaaaacttctcgactgtacggagggaagcgttctctacaaggggaaagacatcggaaagatgaagggaaaagagatgcgctccttacgaaaggagatgcagattatcttccaggatccgtatgcgtcactggatccgagaaagacggtatttcagatcctggcagagccgttctggattcaccatccggagatgagaaaggaagatatctaccgcgaggtggagaagttaatcgagtgcgtggggctgcgtcccgagcatatcctgcggtatcctcacgagttttccggcggccagcgccagcgtgtgggcattgcgagagcgatagcgcttcatccggaattcgtcgtgtgcgacgaacccgtcagtgccctggatgtatcgattcaggcgcaggtaatcaatctgatgcaggacattaaaaaagagtaccagctgacctatctgtttatttcccatgatctgcggatcatcaagcatttctgtgaccgggttatggttatgtatctgggcaatatcgtcgagctgggtaccaaggaggcaatctacgggaaccagaggcatccctatacaaaggcgcttttgtcagcggtatccaatgtaaagggacagggcagcaaaaaccggatcatcttacagggggatatccccagtccggtgaatccgcccagcggatgtccgttccatacgagatgcggctactgtatggaaatctgcaaagaaaagaagccggaactgaaaaagatggccgacggcacgctggtggcctgccatctggatatggaataaaaatcaattacaatttttggaggatagaacaatgaacaagatcgtaacagagaacgcaccgaaggcgattgggccgtattcacaggggatggtatttgaaaatctggtgttttccagcggacagattccggtaaatccggcgacgggagagatagaggggacttccattgagacgcaggctgctcagtcctgtaagaatgtggcggccgttctcgaagcggccggaagcagtatggagcgtgtgattaaaaccacgtgcttccttgcggatatggcggatttccctgtatttaaccaggtgtatgagtcgtattttgtcagcagtcctgcacgttcctgcgttgcagtaaagacactgccgaagaacgttctgtgcgaaattgaagcgatcgcctataaggaatagaagaggagatgaccatggctttatttgatggaaataatataaaactggatgtgctgaaaaagtgggcctacaattaccgctgggccgaggtgccggagggaaccattccgttgactgccgccgatcccgattatccggtggcgccggagattcggaaggcgctccgggattacgtcgacaacggctatttttcctacacaccgaagatgggatatccggagtttatggaggcggcatccagagcgctgtgggagcggaagcacgagaaaatcagccaggattgtatccttccgattgacagtgcggccagagggatgtatattatcgctgagacatatttaaaaccaggcgatgaaatgatcgtatttgacccggtggattacctgtttaaggagtcctgccttgcggcaggcggcgtgcctgtcctgttcccggcaaagctgaaagacggctatatcgacttaagcgaactggaacgttatattacgccgaagacgaagatgatcgggctgtgtaatcctcacaatccatacggcgttctgtaccgcccggaggatttggagcatatcatgagcctctgtgagaaatacgatctgtacattatgaatgatgagatctggtctgatattgtatatccggaacaggagtttctgagcattctctctctcggagaagagcggacgggacgcgtcatgagcgtattcggattctccaagagcttcgggatagccggacttcgggcaggaatgatctactgcaccgacaaagcggtgtttgagcgtcttgtagagaagtctgcggtgatgacgacggcgggcggtatcgcctctgtctctcagattgcaggaattacatgcttaaaggagtgctactactgggtagatgaatttatcagtcatctggtaaagaaccgggattatgcggtggagagaattaacagcatgccggtcatcagctgccataagccgcaggctacgtatctgctctatgtggatatcagcggtctgggagtaccttccgcccagtttaccgattatctgattgaacatgcgggccttgcgctggttccgggaggagaaacgttcttcggtccgggatcggaaggcgccatgagaatctgttttgccaccagccgcgagattctggaagaaggcttaaaccggctggaaacaggattaaaaatgtttctggaagaaaaaaaataagaaaaacggagagtttatgatgcacgaaaatcttcaggtaattcaaacaatgttaaggagcatccatcagatgctcggtgacaggtatgaggtgattctgcatgacttaagtcatgtggaaagctccattgtcggaatagaaggatgtatcacccacagaaagattgggggaccggctacgaattatctgattcaattgctgagagagtacggggatgaggcaaaagacagcatcaattacaaaaatgttatgcctgacggccgggtactgcgttcctcgaccatcttcatcagagacaatgacggaaaaatcattggttcgctctgtatcaaccaggatctgaccgattttatggtggccaaccggctgctcgagcggctggtggagtttaagagtgagcagcatgaagttccaaaggaaatgttcgcacaggatatttccgaggttatggaagcgatggtcggaagcgaactggcgcttatgaataagccggtggcctacatgcagaaggaagacaagctggctctggtggatgatctggagcgcaaaggggtcttcgatgtcaaaggttccgtggagtacgtggcggagtgtctgggcgtgacaaactttactgtttataattatttgaaagaaatcaggacaaagcacaaataatgacgaagacgggccggggggccctccgggcataggaagagcccggtatggaagcaggtactgcctgtctttccgcagcagctccccggccttttttcatccctctgatgaggattcccattcaaaaattccagaattttcttaaaatatatctgctctctgtacgaattccccgttttgttgtatgataatagagataatttttataatgggaggaaatgaacaatgaatctgttttgcagcctcgcaatcgcgttttccatgtactccagaattcccatgcccacagtggcctggacgaaggagcggatgaaatacgccatgtgcttcttccctttaatcggtgtggtgatcggcgccatcacatacggttctgttctggtgcttacggccctgaagctggactggatggccagaatctttcccgttcttgtacctcttatggttacggggggaattcatatggatgggtttctcgacgtcacggatgccagagcctcgcacgcgccggctgaaaaaaaactggagattttaaaagaccctcatacaggggcgtttgccatcatcggctgcggtgtttatctgcttctctacacggcgtttttcggggaaatgaagccggtgatcctggcggcctacggcgggagctttgtgatcacgagggcgctttccggacttgccgtggtgacctttcccatggcaaagaacagcggccttgccgcctcattttccggacaggcgcagaagaggacggttgcggtcaccatgtggctgtatctcgttttcacagagtgctggatactgtatacaggtggaatagcagctgccgtcatgacagccgcagcagccgcgcttacgtttctgtactattaccggatgtcaaaaaaagaatttggaggaattaccggagatcttgccggatattttcttcaggtgtgcgagctggtgctgacagcagtctttgcggccgtttccagagggatactggcataagcggaacatgagatggaaggcgggagagtgtctatgatatttattactggaggagcatggcaggggaaaacggcgtttgcggaaacacttgcggtcgatttcgttacgatggaatcaggagaacgcgtaagctgtgccggctccataacagaaaagaaagcggtcccggtggcctgcggacggagcgatccgtttgaaacggccttcgagcggccggtgatcagtggatttcactattttgtgagacggctgctccgggaagagcgggatgtcaatgaatttattgccgcgatcggggagaagaaccccaacgccgtgattaccgcagacgagctgggctgcggaatcgtcccggcagacccggaagagagggcatggcgggaggcggccggaagggcggctgaaatactggcggcggattccgatgcggtgtaccgcatgatctgcggaatcgccgtcagactgaagtgaaggagaacagatgatacgttaccatatactggctgcattggcgggctgcgccctcgatgcactgtttggagatccgcgcaggattccccatccggtctgcggcattggaaatctgatcgcatggctggaagcacggcttcgcaaatggttcccggcggacgcgaagtcggagagaagagcgggagcggtgatggtctcctcggtcctgcttatcacgggtcttgccgctgcattgatcctgacagcggcctatgcggtccatccgctggccggactggccgtggaaagtgtgatgtgcggacagatgatggcctggcgttccctgagaaaggaaagcatgaaggtgtatgacgctctggcggccggcgatgtggaaggcgccaggaaggcggtctccatgatcgtaggaagggatacggccagcctttcggatctgggaatcacgaaggccgcagtggagactgtggcagagaatacctcggatgggatcatcgccccgctcttttatatggtgctgggaggaggaaccgggatctttctttataaggcggtcaataccatggattccatggttggctataaaaacgacagatacataaacttcggaagaacagccgccagactggatgacggatgtaattacatccccgcccggctttcggcattcttcatgatcgcggcgggctttctcctggaagccgcagaaggagccggaaggcggctgaaaaaaggagacgaagccggaatccggcattacagcggcaccgggggaatccggatattcaaacgggaccgctataaccataaaagccccaattccgcccagacagaatcggtctgtgccggcgtgctgggaatccggctggccggaaacgcctgctacttcggcaggctgtacgaaaaaccgacaatcggagatgcagaccggcctgtggaatatgcggatatccggagagcaaacgcactgatgacgggaacgtacgcggcggcgctttttgtgacggcagtcatcggatttttcctgtttgtttaagccggctgcaccgcgatacagagtgtaaaacgacagaatggagaatgacatcatggaataccagcatggaggagacatttatacgaatcaggtggaactggattattccgccaacttaaacccgctcggacttcccgaaggggtgagaactgcatatatcagggcggcggaccgctgcagtgtgtatccggacagccggtgcctggcgcttcgctcgaagctggcggcctttcaccgcatcgaccgggagaatgtgatctgcggaaacggcgcggcggagcttatttttctgattgtacatgccagacgcccaaaacgggcgctcttaatcgctccctcctttctggaatatgagcaggcgttaaaaaacgggggctgtgagatctcctggttcgatttaaaggaggaagagggctttgccctctctgtgccggagctcactgcatatgtaaagagggaggcggcggccggacaacggccggacatggtatttctctgcaatccgaacaatccaaccgggctggcagtggaacgggcggagcttttgccttttctggaatactgcgaggaatgcggcattgtctgcgtactggatgagtgctttgttgaattcctggacgagccggaacgcttttccgtgatggaagagctccgttccgggcggttcagccgcctgtttattctgaaggcatttacgaagatatatgcaatggcaggcctgcggctggggtacgggattactctggaccgggaacttctggaggccatggacggcagcagacagccgtggagtgtctccggtcccgcccaggcggccggggaggcggctctcctggaacgggcgtatgtggaccggacgagagaactggtaagccgggagagaagtctcctgatggggcagatggaggaactggggttttctgtctatccttccagggcaaactacatatttttcagggaccagcggtcagggaaggccggggcgccggaaacgcgcagcctctatgacgcctgtctggaacgcggagtcctgatccgttcatgtgccaattaccggggacttgacagccgcttttaccggatctgcgttaaggacagaacggacaatgaaacgctttaccgggtactccgggaagcgatggaggaaaggaaacagagatggcaaaatcaatcatgatacagggcacgatgtccaacgcgggcaaaagtctgatcgcggcgggactgtgccgtgtctttaagcaggacggctaccgggtggctccctttaaatcacagaatatggcgctgaattcctatattacggaggaaggtctggagatggggcgcgcccaggtggtgcaggcagaagcggcgggaattaaaccgcaggccgacatgaatccgattctgttaaagccgacttccgattccggctcccaggtcatagtccacggagttccggtcggaacgatgccggcaaaagagtattttgtatacaaaaagtctctggtgcccgaggtggagaacgcgtaccggagactggcacaggagtacgatatcattgtgatcgaaggcgccgggagtccggcggagatcaacttaaagcaggatgatatcgtgaatatggggatggcgaagatggcggacgctccggttcttttggtgggggatatcgaccggggcggcgtgtttgcccagctttacggaaccgtcgccctgctgtcggaagaagagcgggcgcgggtcaagggactcgttgtcaataagttcagaggggataagacgatcctggaaccggggctgaccatgatcgaggatctgtgcggcataccagttacgggagtcgttccctatgccgatgtggatatcgaggatgaggacagcctgggtcaccatctgaaaggaacggagaaggggaaaacgacgctggttgatatcgccgtcatacgtctgcccagaatctccaactttacggattttcagatcttctcctgtatgccggaagtcggcctcacgtatgtggaacggctgtcggaactgggaaaaccggatctgattgtgcttcccggaacgaagaataccatagaggatttactctggatgagagagaatggcctggaggccgcagtgctgaaactggcgtctgccggcgttcctgtcttcgggatctgcggcggctttcagatgctgggggaaagcctggaggatccgtttggcgcagagacggaacggtaccggggacggccggtggaggggcttaagctgcttccggtgaggaccgtcttcgggaaagagaagacgagaacccgggtgaccggttcctgtgcctccgtgggcggaatatttgaagatctgtcgggcatggagatcgagggatacgaaattcacatgggcgggacggtacgtgcagtacctcctctgacctatgtgatggaacagaacggctctcatctggccaagatggatggctgccagagaaatcatgtctacggtacgtacctgcacggattctttgaccgggagggaatcgctgagaccattgtgaacgcactccttaaaaagaagggactggacgcagttccaggcggagaatttcaatatgctgcataccgggaacagcagtacgaccgtctcgcggcagtcatcagagagagctttgacatgaaggcggtttacgggatgatgggaatcgacggcaattccatgccggacagcagaaaggaagattcagaatgatagagacagaactggaacgggtgcttcccggcgatatagagaagagaagctttgagatgatcacggaggaactgggagaccgtatcctgaatccggaatatgagctggtcatcaaacgtgtgatccataccaccgctgatttcgattacgcggacaacctgatgttttccgaacatgcggtggagcaggcgaaggcggcgatccggcagggcgtccgcttcattaccgataccaatatggggaaagcgggcatcaaccggtccgctctccaggcatgcggctgcagggtggactgctttatggctgacgaagatgtggcggaggcggcgaagcggcttggaaccaccagagcgtgtgccagcatggagaaggcggccgaattaggcgaagactgtatctttgctgtcggcaacgcccccacggccctgatccggctgtatgagctgatccgggaaggacggctgaagccgaagctggtgatcggcgtgccggtaggctttgtcaatgtggttcagtcaaaggaaatgattctttcactgcctgatacgccgtttattgtggcgagagggcgtaaaggcggaagcaatgtggcggccgccatctgcaacgcgctgttgtatcagtgccagagtgtgcctgaagcttaagagaaggggagtgcatcatgaatttatacagcattattttggtggacgacgaagaagaggtccgcaagagtattatcaaacagatcgactgggaatcagcgggatttcaggtggtaggggatgccgagaacggggaggacgccttagagaagatcgaggttctggagccggatgtggttctgaccgatatccgcatgccttatatggacggacttacgctggctgagaagatccggcagagatatccatccacgaaggtggtcattttctcaggctatgacgactttgaatacgcgcagaaggcgattaagctgaatgtgaccgagtatatcctaaaaccggtaaatgtagaggaactgacctctatcctgaagcggatcaaatccaacttagacgaggagatcgaagagaagcgcaacgtcagccggcttcgtgaaaattacagaaagagcctgccgattatccgcgagcagtttttcaatgatatggtgcaccggaggctggcggatgatttgatcgagtcgaagctcagagaatacgatatcccgattacgggagccagaaaatggattatcgcggccatcgatgtggaaaagagcgatgaccgaagcaaaaagacgctgtcactccacgaggaggaggaactgattccgatctctgtcatgcagattgtccgggaaaagctgaaaagctactgccggttctccttattccagtccacagccgaagccgggatggtggtgatcgcggctcttgacgatgacaatacgacgactggtctcatcgatgttctgggagatatctgcaaagagacaaaacgtattctggaggttccggtcaccatcggcatcggccacagcgttaccgggctttcgaagatcgcagggtcctaccagtcggcggtggaagccctgggatacaaggcggtggtgggcagcggaatcacgatctatatcaatgatatggagccggtgggcagcggcaaactggaatttgacaattcggacgagtctgattttatttctgctgtcaagttcggtccggatgagaagattgaagccgtaatggtcagaatctccggcaagctggaatcggccagggtacattaccgtcagcagcaggtctacgtgttcggcgttttaaataccgtgattcagatgattcagcagtatgacttaaacctggaggagattctgggcggcgagctggaatacttaagcgtgatagacaagcttcagaagcgggaggagtttggcgagtggctgttaaagacggcgcgcaagatgaaccaggccatcaaccaggagcgtgatatgacgacgcgccaggtgatccagcaggccaagcagtatatcatggacaactatcagaatccggatctgtccgtggagatgatctgccgccatctgcatatgagtccggcttatttctcaaccatgtttaagaaggagacgggccaggcctacattgcctacctgacggaaatccgcctgaacaaagccgtggagctgctaaataagaccgacgacaagacgtatgtcattgcttccaaggtagggtatcaggaacagaactatttcagttacgtattcaagaaaaaatttggagtgtcaccgacgaaatttcgtggagccagataaatgaataaaaagaaaaaaggtaaaatttttcacaatagcagcatacggtatacgatttttacgtattttaccgtgaccgccctggcggccagcttactcataaccttttccatctaccagcgtctggcgagccaggtgtccgagacggtcatggaagaaaaccagagcctgatcggccaggtggcgcggtccgtggagaactatttacgcacggtcatgaagctgtcggattccctgtattacggcgcggtcaaaaatgcggatttatcctcggaatccatcaacagcgagatcaccctgctgtacgataacaataaggacaatgtggacaacatcgccctgttttcccaggatggaaccttaaaagaggcggtgcctgcggccagaatcaagacgaatctggacgtgaccggggacagctggttttccaacgcactggagaagacggagaaccagcacttttccaatccccacgtccagtatatctttgacggcaatgagagccagtaccgctgggtgatctccctgtcacgggccgtggagctgacggaaggaacctcgacggcccagggcgtgctgctggtggatctaagctactccagcctggcgcatctgtttgacggtgtgaccacaggcaccggcggttacgtctatctgatcagcaatgacggggagattctctatcatccgaagatccagctgatcgattccgggcgggttgtggagaacaatctggcggcagccggatacaaggatggaaaccatctggaaaagttcgagggaagagagcggatcattaccgtgaaatccatcggctataccggctggaaggtggtgggagtgactccgaagaatgtggtatccttaaataccatcaagacgaggctgttcattgtctttctgattaccctgattctctttattctgacgctgataaactcctatatttcgtccagaatcaccaaccccatcaaggaactggaaaaatccgtggggtttctggaggaaggcaatttagagactcccgtatacatcggtgggtcctatgagatacagcacctggggacctccatcaacagcatggccagacagatccgggtgctgatgaacgatattgtgacggagcatgaggccaagagaaagcaggaattcgatacgctgcagtcccagatcaacccccatttcctctataacacgctggacattatcgtctggatgatagaaaatgagcagaaagcagaggcggttaaggtagtgactgcgctggcccgcttcttccgcatcagcttaagcaagggaaagagcattattaccgtccgggatgagctggaacacgtccgcaactatttaatgatccagcacatgcgctttaagaacaaattctcctactatatcgacgcttcggaggactgtatggatctggccagcttaaagctgatgcttcagccgctggtggagaacgcgatctaccatgggatggaatttatggacggcgacggcgagatcaccttaaaggtgtggaaggaagaggaggatctttacttcagcgtgcgcgacaatggcctcggcatgactgcagagcaggtggaaagcctgttttccgattcgatccatgtgacctccaaaaagggctccgggatcggcgttaaaaatgtaaatgaacggatcaaactctattttggagaggaatacggactgatgatccattcggaaccggacgagggaacggagattaccatacatctcccggccgttccatacagcaggattctgacggagggcgggggactatgaaaatgacaaggcaggaaaagattatatggagtctgtttgcaggagtgctgatccttctgtttctgctgtcctccaccgatttgattattaaggagaagaagacggagatctatccggtgtctgtcattatcggggaaacaacggatgattactacacgaacttccgcaagggcgtggataaggccgcggatgagtacaacgtggatgtcaacttcatcacgctgtatgaaaagggggatgtcacagagcagatggagcttttaaagcgcgagatcgacgatggggcaaaggcggtggtgctggtgcccttaaagcagaaggagtgcagtgaaatactggacggaatggttctggccagccctctgatcgttatgggaactatctttccgggcgactggggaatgaccggtatctcgcaggactgtcaggaagcgggaaaaatgctgggggaagccatcgcggcggaaaatactccggacaagccggtgttcctattttcggaggggctggagtatggctataaccgggacgtgtacgacggacttctgggcgtgctctcccgggcggggttccagcttcatctctacgagatggataagagcggcatcacagagcccgatgcagcggagaatggggaaatcttccgccggattatggaagaaactgtatatccgggcggggaagccgtaatcgcagcgttggatgtaaagagtctggacttaaccgctgacatcatagccggaagcccggcctacggaagataccttccgcgtctgtacggcttcggcaacaccacaaaaatattaaatcagatggaccgcggagtgatcaaaggccttgtcgttaccaaccagttcgatgccggatatttaagcattgtgaaggcagtggaggcgatcgaaaagcgcggtgaccgggagcagatcaaactggaatcgtattacatcgagaaagatgacttgaaaaaaacacattttgagaagattctttatccgatcgagtaaatcagcggaggggcagatgaaaaagaactatttattatttgcagcactggcggccgcctttctccttgcggccggctgtatcgtttttcagaaccggagtcatgaggagcgggaagagaaaaagacgctccgggtcggcgtgactctgtaccggggggatgattcctttatcaacaatctctgcggaaagatggaggagaaggcgaagagctatgagaaggagacgggagtcaaggtgattctcgatgtcgtggatggaaaaggcagtcagaacacgcagaacagccaggtggatcggtttatctccctgggagtggacgtgatctgcgtcaatatggtggaccgctcggcggcctcctacatcataagcagggccatggagggcgatatccccgtggtgtttttcaaccgggagccggtggaggaggacatgaaccggtgggaaaagctgtactatgtgggggaaaacgccaaagaatccgcggttctgcaggggaatattctggtggaggcctataaaaaggaccctgcttccctggatttaaacggagacggaaaggtgagctatgtgcttctggagggggagacgagccatcaggattcgctgatcaggacggaatggtcgatccagaccctaaaggatggcggagtgccgctcgaaaagatcaccggggggattggaaactgggagaagagccaggggtccgcgtggatggagaagtggctcgatgagtatccggacgaaatcgaactcgttatcagcaataatgacgacatggcgcttggcgcggcggaggcgctggagaggaagaaaatcacgaggcccatcaagattgtcgggatcgacggaacaccccagggagtggaaggacttaagtcgggaaagctttttggaactgtccagtgtgacagcgatgagtacggaagcgtgatgttccagatagccgccgcagccggacttgggcagaatgtacaggaaatcgtgagtttggaagatggaaaatactataattgcaggcagactgcactaacagccggggaaaattagaggacgttgtgcatgttgcgcttgaaaacgtaaaaaaacagggaaaaaatacgaaatctaagaaattctatataaaagcgaaaaaaatcatatggaaatgtgcccaaaataaagatataatatgggtgtcgatgagagaaaatgacgaatcggcaaatactatactatatctagggaggatttatcatgagattactcaaaaaagtagtagcagtaggtatggcgtccacaatggtattcaccatggcaggatgcggctccaagacaacagaaactacggcagctccggcagagacgacagcagctgcagcagaaaccacagcagcaggagagacgacagcggcagcagcagaaacgaaggatcctaacgccaaggtagaaaacaaggataaacctttagtatggtttaaccgtcagccatccagcagtgccacaggccagcttgacatgacggcgttaaactacaacaaggatacctactacgtaggattcgatgccaatcagggtgcagaacttcagggtaccatggtaaaagactacatcgagaaaaatattgattccattgaccgcaacggtgacggcattatcggttacgttctggctatcggcgacatcggacataatgactcgatcgcacgtacaagaggcgttcgtaaggcacttggaacggcagtagagaaggatggcaacatcaacagcgatccgattggtaccaatacagacggcacctccaccatcgtacaggatggaaagattgaagtaaacggaaagagctacatcgttcgtgagcttgcttctcaggaaatgaagaactctgcaggtgctacatgggatgcagctacggcaggaaacggaattggtacatgggcttcttcttttggcgatcagatcgatatcgttgcttccaataacgacggtatgggcatgtccatgttcaatgcatggtcaaaggacaacaacgttcctacatttggttacgatgcgaacagtgatgcagtagcagcgatcgcagaaggctacggcggaaccatcagccagcatgcagacgtacaggcatacttaacactccgcgttctccgcaacgctcttgacggagttgatatcaacaccggtatcagcacagcagacgacgcaggcaacgttctgagtgatgacgtatacgtatataaagcagacgaacgttcctactacgcattgaatgtagccgttacatctgacaactatcaggatttcatggattccaccatggtttacgctcctgtatcaaaccagcttgatgagagtgctcatccgacaaagaatgtatggctgaatatctacaactctgctgataacttcttaggctctacatatcagccgcttcttcagaaatacgataagcttctgaacctgaaggttgattacatcggcggcgatggccagacagagtccaatatcacaaaccgtcttggaaatccgagccagtatgatgcatttgccatcaacatggttaagacagacaatgcagcttcttacacatctttacttgatcagtaatatccagtaaaatttaagaatagcaggcgatcagggagaagaaattctccctgaaaacctcttatgataatcaggcgtttatataagcagaggagtaaaaataatggcagataagaaagatgaaatcgtcttatcaatacgcggaatgagcaagtcctttggccgaaaccgagttctggaccatatcaatctggatgtgaagcgcggaaccgttatggggcttatgggtgagaacggcgccggtaagtccaccatgatgaagtgcctgtttggtacttaccagaaggacgagggcaatatcttcttaaaggggaaggaagtaagcttttccggaccgaaggatgcccttgaaaacggtattgcaatggttcaccaggagctcaaccagtgtctggaaaggaatgtcattgacaacctcttccttggacgctatccggtcaattccatgggtgtagttgatgaaggcagaatgaaaaaggaagcttccgagcttttcagaaagctgggcatgaccgtcaatctcactcagcctatgcggaatatgtctgtatcccagaggcagatgtgtgaaatcgccaaagcgatttcctataattcccaggtgattgttcttgatgagcccacatcctctctgacggtacaggaagtggataaactcttcgagatgatgagaatgttaaaggaacaggggattgccctgatctacatttctcataagatggatgaaatttttgagatttgtgatgagatatcagtgcttcgtgacggcaatctggttatgacgaagagcacgaaggatgcgaatatgaacgaactgatatcggccatggtcggacgttcccttgacaaccggtttccgccggttgacaacactccaaaggatgtcgttctgtccattcagcatctgtccacgaagtttgaacctcatttacaggacgttacgtttgatgtaaaagaaggggaaatcttcggattgtatggcctggtgggcgcaggacgtacggagcttctggaaacgatcttcggtgtccgcaccagagcggcagggcgtgtctatttccataaccgtcttatgaatttcagcagcgcaaaggaagccatggaacacggatttgccatgattaccgaggaacgaaaggcaaacgggctttttttgaagggtgatcttacatttaatacaaccattgcaaatctgaatcagtataagtccggactggcgctttctgacgcaaagatgataaaagcgaccgccaatgaaatcaagatcatgcacaccaagtgtatggggcctgacgatatgatttcaagcctttccggaggaaaccagcagaaggtgatttttggaaaatggctggagcgcgggccgcaggttttcatgatggatgaacctacaagaggaatcgacgttggcgcaaaatacgaaatatatgagctgatcatcaatatggcgaagcagggaaagacaatcattgttgtttcctctgagatgccggagattctgggaataacgaaccgtattggtgttatgtccaatggacggctgtctggaattgtgaatacgaaagagacaaaccaggaagagcttttgagactcagtgcaaaatacctataacaggggagatggatggatatggcgaaaggaaacagcaagactcttacggctgaacaggaaatgaagctgcgccagccgatcgaggattatgttggcaggattcagagtaagatcgacaacctcagagcggatggcaccaacagggcagtcgctcttcagaataatattgacgcaataaagagggaccgcagcattccgaaggaagagaaagaaaaccggattgcagcttataagacggaacttgacaaagcaaaagcagtcgaagcaaaaaataaagacgagatttcaaaattaatttctgacgcgacagcatacttaaaggcacactttgataaggattattatcagcctttgaaagaaagctgcgaacaggaaaaagttcttgcaaaggaaaagtatcagaaaaaaattgcagagctggagaaagaacatcagagtaatctgtcaaagcttacggatcaccaggaagtgaaggatgaaaagtatgttcacaagaaccggatgtttgatgcgaagatggagctggagaaggaacttcagcagatcaaggacagaaggcacgcggcattcgcatggcagtatcatctgatcgatctgctgcgcatctccaaattcaccttcatggagtccagggcgcagaaatgggagaattataaatatacattcaaccgcagggcatttttgctggcgaacggtctgtatattgcaattattctgatttttatcgcactgtgtatcgcaacgccgatcatcaaaggcgttcctctgcttacttataacaacgtgttaaacattctgcagcaggcatcaccgcgaatgttccttgcactcggtgttgcaggactgatcctccttaccggtacggatctttccatcggacgtatggtaggtatgggtatgacaaccgctaccatcatcatgcaccagggtgtgaatacaggtatggtattcgggcatgtatttgattttacgggtctgcccatcggtgtgagagtaattttcgcactgttcatgtgtatcgttctgtgtacgtgttttactgcaatcggaggctttttcactgccagattcaagatgcatccttttatttctacgatggcgaacatgctggtaatcttcggccttgttacgtatgcgacaaaaggtgtatccttcggcgcgattgatccgtcgattcccaagatgatcattccgagattaaacggattcccgacgattatcctctgggcaattgcagcaatcgtaatcgtatggtttatctggaataagacaacattcggcaagaacttatatgcggtcggaggcaatccggaagcagcatcggtttccggtatttccgtattctgggtaaccatgggagcatttatcctggctggtattctttacggatttggttcctggctggaatgtgcaagaatggtcggctccggctccgcagcttacggccagggctgggagatggacgccattgcagcctgtgtagtaggcggcgtatcctttaccggcggtattggtaagatttcaggtgtagtagtcggtgtcctgatcttcaccgtactgatctactcacttacaatcctgggtatcgatacaaacctgcagttcgtatttgaaggaatcatcatcattacagcagtaacactggactgtctcaagtacgttcagaagaaataacgttcgcgctggcaatgagcagtgcgaaaaaagacatggaagaatctgcgttgtgctcgcacataagcagattcttccatgtcttttttcatagggcgaagcccgtgaccgaggtggagcgcagcggaaccgaggtgcactgcggaccagcgggcaacacaatgaaattgaaatcaagattcccgtcacaccgcacaatcccattttaaaccagcccggccagtctgctgttctgatactccccggaaaacgtcacatcccgtccaaaccactccggcggtgtaaaggcctccgcctcttccacggtttcgaattccacctcagccagcatcagtccttcaaatttcccctcaaatacatcgaattcgatggtcaattccgtgccttcgatcggaatgaagtaccgtttctttgagataatattgccgtcagcctttgaaatcaagtggtcatacgactctttcgtgaggggcaggttatactcttctctggagagcagcccctttgacttataggtgagataacaggtgtcatcctctctgcgcacgcgtaccacaggctccgtacacagatacccctgctcgatggtatgaaaagggtaagtatcgtaattgaaaagaggatttgtgatcaaaaatttgcgttctatctccattttaaatgacctccggaaatgtaatatcgtgtgttcttgagatattatatcacagatttcttccgactcaagcaggataaacttgtaaacttacagaattattaagaattgtggttcctcatgaggctgagagcgatttcaggattttcgttccgccagggagccggggccggagcgaaaatcccgaaatcccagctaaagtaattgacgaaagcagcttttcataattctgtaagtttacaagtttatcctgcgcctcaagcggatggggtagaaaaaataacctaaaagtggtaatatggaaattacagacaaaaaacaggagaatacatcatgaaaaagagagagtgccgcatcttttccatcgcccttttactggctctggccgtctgctttctggcggcatgtgtatccggtcaggatggaacacaggaatcgacggaagcggcgaagggtgagacggagagtacggaggacagcggcggcagtacggaagcggcggagaagaaactgcggatcggcgttaccatttaccggtatgacgataattttatgaagctgtatcgggaggaactgaggcagtatctggaggaaacgtaccaggcggaggttgtggtgcgaaacgccagaggggagcaggaagaacagatctcccaggtcaacgactttatcgaggccggatatgacggaatcatcgtgaatctggtggatacggaccatgccggcgtaattgcagattcctgccatgaggccgggattccccttgtgttcataaaccgggagcccaaagcagacgagcaggcccggtggaaggcggagaagatggctgtttcctgtatcggaacggattcgaagcaggccgggacctatcagggagacatcatactggagacggatacgcgcggagatttaaaccgcgacggaatcgtatcctatgttatgattatgggggaaaaggataacgaggacagtgtcagccgcaccgagtattccataaaggcactggaggcgggcggtatgaagacggaaaaactgtattccggatatgccggctggaataaggaagaggggcggaagctggcggagaaggcgcttgcgctctatggccggcggattgaggttattttctgcaacaatgacgccatggctaacggtgcctgggaagccatcgacgcagcgggaagaaaaaccggaaaagacatctatctggtgggggtggacgctctggaggagacggttcagtatatcaaggaaggcaaagtgacgggaaccgtgctgaatgaccatacggggcagtcccacacggccgccgatgtgctgatgaagatgattcacggtgatgaggcagagacaaggtatctggtggattatgtgaagatttcaaccatcagcaccctgcaaaaataaaaatgaagaagcagagaggaacaggatcatgggaaaagtatatgcatttgttgcaaatggatcagaggaagtggaacttctggcagtcgtggatgtactgctcagaggagggcaggatgtgaagctggtttccgttaccggaagcagagacgtggttagtgcccatcagattaagatacaggcagatctcgaattttcagaggctgatttttccgacgcggatgttctgtttttaccgggcggaatgccgggaacgagaaatttagcggctcaccggggattatgtgacgaactgttaaaggcggacagggcaggaaagaggctggcagccatctgcgccggtccaagtgttctcgggggactgggaatcctggaagggagaaaggccacgtgttatccgggctttgaaggggaactgaagggtgcggaatatacgagacagggcgtcgtaacggatggcaatgtgacgactgccagaggtctgggctatgcactggatctgggaatcgaactgctggcgcttctgacggacagggagcatgcggctcagatcaaagaatcgatccagtatgatcagattccaatgtgaggataaggacgtgatggggatgaagatgaaaaaaaactgggtactgccggtcctggctgcggggattttagcatccggcttaacggggtgtgaaaagaaggatccttacggcctttcggcaaagaatcctgtaacgattacgatctggcactattacaacggtgttcagaaggagggctttgatcagctggttcagacatttaacgagtcggaaggccgggaaaagggaattatcgtggaagcctacagcaaaggcagcatcgatgatttaagccaggcggtgacggacagcattgataagaagataggctctgatccgattccggatgtttttgcggcgtatgccgataaagtctatgagattgaccggagagggatggcggttgatatcagcaaatatctgactgcggaagagatcggcgagtatgtcgacgcctacatagaagaaggaaggtttgacggaagcgagggaatcaaggtattcccggtggcgaaatcaacggaagtttttgcgattaataagacagactgggataaatttgcagaggcgaccggtgagacagacgcggctttttcctcctgggagggaatcacgcgtgtggcagagaagtattataaatggacggacagcctgaccgagacgcctgacgatggaaaggcattcttcggaagagacgcatttgccaactatatcattataggaagcctgcagctggggcatgagatcttccgtgtggaaaacggagaagtaatcatggattttgaccggaccgcgatgaagcggctctgggataattattatgtcccatacgtcaacggttactttggcgcatttggaaagttcagaagcgacgatgtgaagacgggacagctggcggcctttgtgggatcaaccagtggatttgcatattttccgaccagtgtcactctggaggatggcaccagctatccgatcgaaagcaaggtctatccgcttcccaatttttcaggcacggagccgtgcgccgttcagcagggagcaggcatgatgatcctgaaatctgaggaaaaaaaagagtatgcggctgccacttttttgaaatggtttacgggtgttgacaataacatcagattttccgtatcctccggttatctgccggtgaagaaggaagcgggagtgaaggagcggctggagaccgtgctggcggaagccggtgaggaagatgcggcaagtgacaatctgctgatcggtctggagactgccaacaaatatgagctgtatacaacgaagcctttcgaaggcggagaccgcgcccgcgcggtgttaaacgccaccatggcggataaggccggggaggacagagagatcgtgctgtctctcatggcgcagggaatgcccagggaggaagcggcagcacagtttaccacggaagaaaattttgaacggtggtatgaagatacaaaagaacaactggagaccattattggagagtagttatgaaaaaaagcaggaatgaatccatcagaacccatctgctctggccgctgttagtgctgctcattatacaggcactgattatggccggtatggttctgttcggcggtgtttctaaaaaactgaagaataatgaaatccatattttaagcgaaaatacggataataccagactgtatctggagaaggagacgatccaccagtggattaacgtcatcaacgactccggatcaatggcgtctgagattcagtcagttttagacgaacagcataaagatgcgtcctgtatttcaaacgattacgatttaaaccggaagattgccgacgggattatcaaccgggctgtcgatctcatgcgccgcagctacggtacgggcatatttgttgtgttaaacggtccggccgcgcagaacagtacggaaaatacgaaggccgggttttatattcgtgattcgaatccgggcagaagttataatcaggataattcgtccctgcttttggaacgggggcttccttctcttgccaataaatacgggattccgctggattccttctgggatcttgggtttgacgtaactgcggatgacggcagcaccgattactataaaaaaccgtttgattccgcagtggaaaatcaggcaaaggccggagaacggctgaattttgcgtatttgagcaaaccgtttcggctgagtccgaaagatattcctgttattacatactctgcccccattattctggaagatggcagtgttgtgggcgtattcggactggagatggggatcggaaggattgaacaggtactgagcgccgacaggacggagagcagctttgaggtctgctacgccctgggagtccgccaggcaggtgagaacatcatcactccggttgcctcctccggctatctctataatcagtattttaagggcgatgaatatctggaatatacggataatgaggaggaggggatcggtgaactccgctcctccgaccgggccggctggtatgccagtgtcaaacagctggacgtatataattataatacaccgtttgaacaggaggagtgggtcctggtcggtatggccaggaagaatgacctgctgtccttttacaattctatccgcggcatgctgctgagctctattctgattccgattattctgagtgtattcggagtcttcgtgatcggaaagattgtaaccgatccgatccgcggtctcgtgaacgaagtgcgtaagcgctccggggagcacggtcttacactgacccgggttcacatcggggaaatcgacgagctgactgagacaatcgaacagctgagcgccgatgtcgaacggtccgcatcgaagatatccagcattctggagcatgccaacgtgctgatcggcgtgtttgaatatgaagaaacgaacgaaagcgtattctgcagccgttctattttcgagatgatgggctgggctgaaccggaggagccctactgctatatgagcagcggggagtttcagaagcggatggaagaggcaatccgaaatacaaaaaaagatggtgtcaattacctgtttcacattaacgtctctccggcgtcagacgatacgggggaggcaggtgtgtcctgcgggccggcagcattcagccgggggcgctgggtacggctgatcctggataagcaggagccgggaacgattctcggcgtgctctcggatgtgacgagtgacgtggaggaaaaggagaagctggagcgggagaggaattacgatctgctcaccaatctctataaccgaagggctttccgggagcagctggtggtagccatggcggatggcggcattcagaccgcggctgtggccatgtgggatctcgataatttaaagtatatcaacgatacgtacggccatgacgagggcgaccgctatatcgttctgtttgccagctgtctaaaacggctggagaaggatggcgccattgtctcgcgttattccggcgacgaattcgtcacgctgatttacgggagcggcggaaaagaggagatccggcatagagtcactggtttcatgcagtttttacagacggtcagccttgagatgaagggcgggtatcagatcccgatccgtgtttccggaggaatggcgtggtatccggacgacgccgtggattttgacacactgttaaattacgctgattttgccatgtacatggtgaaacacagcgtgaagggcattatcatggaatttgattccaacgactactccaataattcctacatgctggccggccgggaagaattaaaccggatgctggagacgcgggaggtggattttgcattccagccgattacgaggcgggatggaagcgtctttggctacgaactgctgatgcggcccaattttacgaatttaaagggaataaaggaggttctgaatctggcgagggcacaggcgaagcttacgcagatggagacgcttacctggtatgccggactgaaggctgtggaaaagcaggatcaggcgggagcgctgggacagacggaacggctcttcatcaattccatcgccagcgcctgtatgtcgaaggaggaggagggggatctctggaaccgctacggccgctatctgtcgcgtgttgtgacggagcttacggagggggaacccgtcaaccaggagtatatgaggcagaagattgcggtgaccaaagcatggaatgggctgatcgccatcgacgatttcggcgccggatacaacagtgaaaccgtgcttctcgacatggagcccgatatcatcaaggtggacatgagcctggtgcagcggatccatgaagatcccaaccgccagctgatcctgaataatattctggacttcgcggcacagaatcatatcacggttctggcggagggcgtggagacgaaggaagagctggagttcctgatccagtgcggagtagaactgttccagggatactacattggacggcctcagatggaaatccgtccaatcgatccgtacatcgtcaggaaaatgcaggaattcgccgaaaaatcggacttttcacagaaatagtactggaatttaccgaatgagtatgctataatgctaaattgaagtgtaacgccctgtcggtatggcggttcacatatatattcaaggaggaacccatagaatgagtttacaagtagagaaattagaaaagaacatggcaaaaataaccgtagaggtaccagctgaacagtttgagaaagcgctcaccgcggcttttaataagaataagagcagattcaacatacctggcttcagaaaaggaaaagctcctcaggccatggtagaaaagatgtacggcgtagaggtattatatgaggatgccatcaatgaggcgctcgacgctacttacggcgatgccgttaccgagagcggactggaggttgtatccagacctgaaatcgacgttgtacaggttgagaagggaaaagaacttatctacacagcgactgttgctgttaagccggaggtaacactcggcgaatacaaaggaatcgaagtagagaaggcatccgctgaagtgactgacgaggacatcgaggcagagcttaagaaggttcaggagcagaactccagactgatcaccgtagaggacagagctgtggaagacggagaccagactgttattgatttcgaaggatctgtagacggaaccccatttgaaggcggaaagggcgaggattatcctttaaccatcggttcccattccttcatcgatacatttgaagagcagttaatcggtaagaacatcggcgaagagtgcgaagttcacgtaaccttcccggaggaataccatgcaaaggaactggcgggtaagccggcagtattcaaggtaactgttaaagagatcaagagaaaagaacttccggaattaaacgatgagtttgccggagaggtatctgagttcgagactctcgaagagtacaagaacgatgtaaagtccaagctttctttaaagaagcagaaagacgccgctacagagaatgagaatcacgttgttgacaaggtagttgagaatgcgcagatggatattccggagccgatgatcgacagccaggtgaataatatggtgaatgactatgcaagaagaatgcagagccagggcctttcccttgaacagtacatgcagtttacaggtatgacaatcgagactttaaaggaacagatgaagccgcaggcagttaagagaattcagaccagactcgtattagaagcgatcgtgaaggctgagaatatcacggtttccgatgaagctgttgagaaagagatcgcagacatggcggaatcctacaagatggaagttgcccagattaaggaatacatgggtgagaacggcatcgagcagatgaaggaagacttagcggttcaggaggcagttgatttcctggttgctgaggcaaagttagtttaatacgttcagaagaccggggagattcctgacaaagtctggagtctgctcggctttcgtaatataaggacaggaggaaacaatatgagtttagtaccttatgtcattgaatcgacgagtaagggcgagcgttcttacgatatttattcaagactcttaaaagaaagaatcattttcctgggtgaagaagtgacggatgtatccgcgagcatcgttgtagcccagcttctgtttctggaggcggaggatcccaataaggacatcaacctctatatcaacagcccgggcggttccgtaaccgcaggtatggcgatctacgatacgatgaactatatcaagtgtgatgtttccaccgtatgtatgggcatggcggccagcatgggcgcatttttactgtccggcggtgcaaagggaaagagattcgctcttcccaacgcagagattatgattcatcagccttccggcggcgcacagggacaggcgacggagatcaaaattgttgcagaaaacatcttaaagatcaaaaagcgtttgaacgagattctggctgcaaacacaggccagccgtatgaagtaatcgaacgcgatacagagcgcgacaattacatgaacgcagaagaagcaaaagcttacggcctgattgatgaaatcatttacagccacgagcattaagccagaatgaagttagtgattaaatgagaaagaatgaggtgtgtatatgccggtcagaacggacgacaaaatccgatgctctttttgcgggaaaacgcaggaccaggtaaagaaactgattgccggttccaataatgtctatatctgtgatgagtgtatcgatctctgtgcagagatattagaagaagagttcgacagtcatgaagaagaagggcctgatttcagcgacatcaacttaatgaagccgaaggagatcaagtcatttctggatgactacgtcattgggcaggacagtgcgaaaaaagtattgtctgtagcggtctataatcactataagagaatcacgtccaggcgaagcatggatgtggatgtacagaagagcaatatcctgatgctagggccaaccggctgcggaaaaacgtacgtggcgcagacgcttgcaaaagtgctgaacgtgccgtttgccatcgcggatgccaccgctctcacagaggcgggctacgtgggtgaggatgtagagaatattctgctcaagctgattcaggcagcagattacgatatcagcagggctgaatacggtattatttatatcgatgaaattgataagataacgaaaaaatccgagaacgtgtccatcacgagagacgtatccggtgaaggagtgcagcaggcactcttaaagattctggaggggacggttgccagcgttccgccgcagggcggaagaaagcatccgcaccaggagcttcttcagatcgataccacgaatattctgtttatctgcggcggagccttcgacgggcttgagaagatcatcgagagccgcttaagcgcgggttccatcggctttaacgccgagatcgtggataagaaccgaaccgatatcgatgatctgctgaagaaagtccttccgcaggatcttgtaaaattcggtctgattccggagtttatcggccgtgtgccggttacggtttccttagagcttctcgataaggaggctctggtaaaaattctgacagaaccgaaaaacgccttaatcaaacagtatcagaagctgtttgagctggacgatgtgaagctggaactgaccgaggaagccgtcgaaaggattgcggagctggcagtggagagaaagacgggggccagaggcctgcgctctattatggagagcgtcatgatggatatcatgtatgagattccatccgacagcaatatcggtatctgtacgattaccaaggctgtcgtgaacaaagagggagagccggagatcatctacagagatacgacggtgcccagaaaatccctggcacagaaactgagaaaagataagacaggcgagattgcataggatccagagaaagttcggaaaggtgttacagcaggaagaactgctgcagcacctttccttatttccgcaggcagcgagccaaacggacgcgcgggcagaaagtcagatggcccgtccgttctgtcgggatgcaaaggagagaaaaatggaagataagacaataacgatgccggtcattgctttgcgtggcatgactgtccttcctaaaatgatgatacatttcgatatcagccgcagtaaatccatcgcggctgtggagaaggcgatgatcggagaccagaaagtctgcctcgttacccagaagaacagtgaggaagcagatccgggaatcgatgagctctatcaggtaggctgtgtggcgctgatcaagcagctggtgaagattccgaacaatgtggtacgtgtcatggtcgagggcctggagcgagtggagcttctgggactggacagcgaggaacccatgcttgtaggcgaaattgaaggtctgacggaatcggatgattccctggactgcgttacgagacaggccatggttcggatcctgaaggaaaaactggaagaatacggcagggaaaaccccaggatgctgaaggaagtcttcccgaacctgatgatggttacagatttaggcgagcttctggatcagattgcgatccagcttccgtgggactacaagagccgccagcaggttctggaatgtgtactgctggaagaacggtatgagactgtcatgggaaatctcctgacagagatcgagattacccgcgtaaaacgggagatccagggccgtgtcaaggagaatgtagataagaaccagaaggactatatcctgcgggagcagttaaaggtaatccgcgaggagctgggggaggataatcctttgtccgatgcggatgaatatgagaagcagctgaaggctctgaaggcggacaaggagacgaaggacaaaatccacagggaaatcgagcggtttaaggccatgccgggaggcagccaggaagccaatgtactccggatgtatctggagacggtgctggatcttccgtggaaaaaaatgtcgaaggacaacaacaatatgactcacgccgaagagatcctaaacgcggatcattacggtctggaaaaggtgaaggagaggattctggaatatctggctgtccgcattctgacgaagaaggggacaagcccgattatctgcctggtgggacctccgggaaccggtaaaacatccatcgcccggtccgtggcaagggcgctgaacaagcagtacgtccgcatcagccttggaggaatccatgacgaggcggagatcagaggccaccggaagacgtatgtcggagccatgccgggccgaatagtggaagccatgcgccaggcgggcgtcagcaatccgctgatgctgttggatgagatcgacaaggtgagcagcgattataagggagacacttcatcggcgcttttggaggttctggacagcgaacagaatgtgaagttccgggaccattatgtggaactgcccattgatctgtccaatgtgctgtttatcgcaacggcaaatacgacgcagacgattccgggtccgcttctcgaccgtatggaagtgattgaagtaaacagctatacggagaatgaaaagttccatattgcgaaaaactatctggtaaggaagcagctggaacggaacggactgacggaggaacaggtctccatcaccgataaggctctggagaagattatccataattataccagggaagcgggagtgagaaatctggaacgccggatcggcgatatctgcaggaaggcggccagggagtttctggaagataagaaaaaggcaatccggatcacggaaaacggactggaaaagtatctgggcaaggaaaagattacctttgaggatgtcaacgaggaagatcaggtgggaatcgtaagaggactggcctggaccagtgtgggcggagataccttacagatcgaggtcaacgtcatgccggggaagggaacgcttcagatgaccggccagatgggcgatgtgatgaaggaatcggctcagacggcattaagctacattcgttccatctgcccggattacggcgtagcggacgattactttgaaaaacacgatattcacctccatattccggagggagcggtgccgaaggacggtccttcagccggcattaccatggcaaccgccatgctttcggctgtgacaggcagaaaagtggatgcaaagctggctatgacgggtgagattacgctgcgcggaagggtgcttccgatcggcggcttaaaggagaagatcctggcagccaggatggctcatatgaaaagagttctcgtaccggataagaacaggcctgatattgcggagctgtcgaaggagatcacgaaagggctgaccatcatttttgtgaaggatatggctgatgtgcttaaggaagctctggtatcacctgcgccagtgagcgaatagaaaggaatccatatgattatcaaaaccgtagaactggagactgtgtgcggaatcaccagcacgcttccggaaaatacaaggccggagtttgcatttgcagggaaatccaatgtgggaaagtcgtcgttaatcaatgcgctgatgaaccgcaaggcttatgcgcgaacttcctcccagccgggcaaaacacagaccatcaatttttacaacattaacgacactctttactacgtggatttacccggctacggctatgcaaaggtaacacaggaggtaaaggccaagtgggggaagatgatcgaaaactaccttcacaaatccccaatgctgaagtgtgtctttcttctgattgatattcgccatgagccgtctgtgaacgacaagaccatgtatgactgggttgtttttaacgggtatcagccggtgattatagcgacgaagctggacaagatcaagagaagccaggtgcagaagcatttgaaaatggtgcgccagggactggggatcggccaggatgtaacggttattccgttttctgctgagacaaagcagggcagagaagaaatatgggccctgattgaggaaatgacgggagagtcttgacaagaagtaaaaatctttttataatgaacctatttatgatatagctttttgatacataggtttcatttcataagagaagaggagaaaacagttatgaaaaaaacaggaaaaagtctggtagcagcgtgtcttgcggcggttttagccgtgtcggcgctgactgcatgtggaagcaagagcccggcgggggatacagctgccgccggaacggagacgactgcggcgggagcagagaacgctgctgccgggaatgagggagagaagaaggtcttaaaggttgcaatggaatgcagctatgcaccgtacaactggacccagcctaccgatggtaacggagccgtgccgatctcgggaagctctgattttgcatacggatacgatgttatgatggcgaagaagattgctgatacgctggggtatgaactggagatcgtgaagctggactgggattccctggtgccggcagtacagtccggaaaggtagactgtgtgattgcaggccagtcgatcacctccgagcgtcttcagtccgtcgattttacagagccgtattattatgcaacaatcgtgactctggtcaagtcaggaagcaagtatgagaatgcggccagtgtcgcagatcttgcaggtgcaaccgctacctcccagatgaatacaatctggtatgacaactgtctgccgcagatccaggatgcaaccattcagccggcacaggaatccgcaccggccatgctggtagcgttaagctcaggcagatgtgatctggtggtgactgataagcctacgggacaggctgcgcttattgcatatccggatttcaagcttcttgattttaccggtacagagggtgaattcaaggtatcagatgaagacatcaacattggtatctctttaaagaagggaaatacagaattgaaggaagccatcgatggcgtgctcgctgcgatgaccgaggatgattttaacaggatgatggaagaggcgatttccgtacagccgttatctgaataattagaataagagagatcttcagggcttgcaggcacgggacagtgtagtcgatttccgtgccgcttgttctgttcggacaaaaatttgcaaaaaggagaagtaatcttatgtcactgccctcagatttttttggaaggattgtgtttatcctgcagaagtacggggtatcatttttagacggtgcaggaaagaccatgatgattgccattgttggcacccttatcggctgcctgattggtttcgcagtcggaattgtccagacgattcctgtaggtaagtcggacaacccggtaaaaaaggtgatcctgggttttattaagctgatactgaatgtgtatgtggaggtattccgcggaacgcccatgatggttcaggccatgtttatttactatggatcctccgcgcttttcggccttaacatgtctccgatgtttgccgcctatttcatcgtttccatcaatacgggcgcctatatggcggagacggtgcgagggggaatcctttccatcgatccgggccagactgagggagcgaaggccatcggcatgacgcattaccagaccatggttaacgtcattatgcctcaggcgctgcgcaacatcatgccgcagatcggcaataacctgattatcaatattaaggatacgtgcgtactgtctgcgattggcgtggtagagctgttctacgctacgaagagtgtggccggtgcgtattatacgtatttcgaggcgtttaccatcaccatggtgatctattttgtccttaccttcacctgctccagaatcttgcggtactgggaaaagaaaatggatggtccggacagctacgatcttgcgaccaccgatacgcttgcctataccagcggcatggtgaaattccctgatccaaatgagaaggaggacaagtaattatggctggatcaacagtattggaaatccatcatttaagtaagaccttcgggaccaatgtggtcctccgggatattgatttctccgttgcagtgggggatgttacgtgtattatcggggcctccgggtctggtaaatccacgctgcttcgctgcataaatttactggagacaccgactacgggggatattctgtatcacaatacggatattaccagcggaaagatgagcgccgcgtcataccggacgaaagtgggcatggtgttccaaagctttaatttatttaacaacatgacggttctggacaactgtatggtgggccaggttaaggttttaaagaaaagtaaggaagatgcgaagcgcaatgccatgcggttcctggaaaaggtagggatggctccgtatattaatgcaaagccgagacagctttccggcggccagaagcagcgtgtggccatcgccagggcgcttgccatggaaccggagattctactgtttgatgagccgacctcggctctggatccgcagatggtcggggaggtactggccgtcatgaggacgctggcgagggaagggctgaccatgatcattgtaacccacgagatggcgtttgccagagatgtctcgaaccatgtggtctatatggctgatggtgtcattgaggaagagggagcgccggcggatatcttcggaaatccgcagaagacttcgacgaaggaatttttgagcaggtttatgcaggggtaataaatcgcgagcctggttcaggcggtctaaagattatatatggaaatcgcaatccgatatagggactgtgcaaagtctgttgattttgcacagtcctctttctataatgggcataaattcaaatatgacagcagtcaggaggaagaaattatgccggaaagttttatgggagggattggatacatcttacaggagtatggaatgtcatatctgctgggagccgcaaagacaatgaagattgctctggttggaacgtcgatcggatgtctgattggccttgcggtcggtattatccgcaccatacctgtcaaaaaggatgaccgtatgggcagaaaggcttttttaacagcggttaaagctgtgatggcggcctatgtggagattttcaggggaacacccatgatggtgcaggccatgtttctgttctttggggcatccgcggtatttcagattaacatgtctattggttttgccgccttctttatcgtctctatcaatacgggcgcatacatggcggaatcggtcagaggcggtattaattctacggatccggggcagacggagggggccaaggcactgggaatgacacatgttcagacgatggtgcttgttgtgctgccccaggctctcagaaatattatgcctcaaatcggaaataatctgatcattaatatcaaggatacgtgtgtgctgtccgtgatcggtgtggttgaactgttctacacgtctaaaggagttgcgggagcgtactatcggtatttcgaggcatttaccattaccatggtgctgtattttgttttaacctttacatgttcccgtattctgcttcttattgaaaaacgtatggacgggaacgggagttataagatggagcctcaggcggccgggaaaggagcagtattatgagcgggacggaagctattctggaaatgaggcatattgggaagtacttcggagcaaatgttgtactgcgcgacgttaatttttctgtgagggagggggaggttacctgtatcattggagcgtcgggatcaggaaaatccacattgctgcgctgcatcaatcttttggagatgccgacctccggagaaattctttaccgcggcgagaatatcttaaaaccggatatggaggaggcgccttacagagcgaaggtaggcatggtgtttcagagcttcaacctttttcagaatatgacggtccttgacaactgtatggccggacagatacacgtggcgaggcgcagcagagagacagccagggaaaaggccatgtattacctgacaaaggtaggaatggaaccatacatacatgcaaagccgggacagctgtccggcggtcagaagcagagggtggcaattgccagagccctcgccatgaacccggaggtactgttgttcgatgaaccgacgtcggcactcgatccccagatggttggggaggtgctgaccgtcatgcgaaatcttgcctcggaaggactgaccatgattatcgtgactcatgagatggcgtttgcacgtgatgtttcaaaccatgttatctatatggccaatggtctgatagaggaggaaggaacgccggaagagatatttgagacgccaaaaagggagtctacgaagaattttttgaaacgttttcggtgtgagaagtatattgacgggagtcattgacagggaccgggcagacaactgtaatcataattaaaaaggaaggaagcactttgacgtgcacccttcctttttaattatgattttaaccaaccggctctataggaaccgattccaccgagccagtttccgccacagccgccgtctccacgggaaccggctttatgatctctttttccaccggtttcatctcagccggcacaggaacagccggtctgggcggtgttttcttctcctcctggggttgctgcggtttggcgaagaggctgcgaaccttaatccgtatgaaggttttaatgacctttaccgagagcaggatgatgaaaacaggaagaatgacagtcagtatgatcctggcttttaagagaaatttcctgcgcttcagtctttttagttcggcctggtactcgtctctgatttcctgtatgatggatctctgtttttttatctgcatgaaaagttccccctgataatcgatagtttcttactcaaaagcgatcttcttttaaacggtcttatacggtttttatattaatcgctcataagcgccttcatggcaaaagcatagatttcctggctcttggccttccagtggtcacacatgatctccgcctggtccttgtcgggaacagccagctgtaaatcgatcagacagcttttcccctcacgcacttcgcagtgaacgatgtaatcctgactggtggatttgtagaaatccgcggtcacgcccacctcgttgcggaggcggaacttgttctctttcaaatattcatcgatgtcttcaatgatggcggaggatatcttgttgccgaagaacgacagggtttcctctccctcccgcgtgatctcatagcggctgctgttgtggttggtctccacatggaggagctttgcctccagaagttcgtttaatgcctggttcagtgtgaaatatgtggtatattcatgatccaggaaaaaatttgacagctgcgcgctggtaaggggaaaattgacctgcttcagcatatacaaaatcattaatttataaagcgtcatgggttctgacaacataggacaccctccatatagtagttattacttttgtatatgatctttcactgcacggctgacgacatcggctacacgggggtcaaatgcctccggcagaatatggttttcatccagaatggattcatccaccagccctgcgatagcagcggcggcagccagcttcatctcctcggtgatggcggtggcccgtccttccagagcccccttaaagatgccggggaatacaactacattattgacctgattaggaaaatcagaccttccggtgccgataattttggctccggcctctttcgcaaggtcaggcatgatctccggaacaggatttgccatggcgaagagaatcgcatctttattcatggacgcggccatctccttcgtcacgattcccggtgcggatacgccgacaaagatatcggcgcccttcatggcgtcggccaggctgccggatgcgccctctaagttggtcacctccaccatcttttcctgcatccagtttaaaccgtccatacccttctttaagattccggcgcggtcacacatggtgatgtgggggaacccataggttaagagaagctttgtgatggcgattccggcggaaccggcgccattgacaaccacgcggcattcttccttcttcttgccggttacctttaaggcgttgatgattccggccagaacgacgatggcggttccatgctggtcatcgtggaagactgggatggggagcagttcttttaaacgctcttcaatctcaaagcatctgggagcggagatatcctctaagttgatgccgccgaaggcgggggcgatgttgaccacagtctttatgatctcttccgtgtcctgggtgtcaaggcagatggggaaggcgttgacgccgccgaattctttaaaaagaaccgccttgccttccatgaccggcatagcggccaggggaccgatgttgccgaggccaagaactgcgctgccgtcggaaacgactgcgatcgtgttggatttgatcgtatatttataagcggcttccgggtctttcgcgatgaccttgcagggttccgcaacgcccggggtataggcaagggctaaatcttctctgcttttcacctcggctttggacgtggtttccagctttccgttccattcttcgtgtaataataatgctttttcgttcgtcgtcatttgtctcgtccttcttctaccagtttttactttatcataccaattttggagggctaaatcaagaatcatttacaaatatattacaatatggcagcagctaaaggctgtaaagcgatatggctcagataatcaaatatgaaagcgggagaagaaatacaggtgtgcgggcaaaatgtggaaacagagaattaagggttttaaatcaatggaaagtatgttagaatatagagtaattaaactgagaggttaaagctgtcagataaagaagattagatatagaatatgagatatagagtataagatacagaacataaaaacggaacataagatacagaacacaagatacaggtggtactatgagagaacgaatcaacaggctggcgaaaggcatcatcgattcggaggttcccgtgattaaggtcactccgaaagaaaccaccgacgtggtgcgttccggcggagccacgaggcgggaacttgtcgttaccagtgagaataatctgcatataaaaggacttgcatattcttccaatttccgcgtaaggcttttaaacggagcgtttggcggcacctacaaccatctggtctatgaggtgaataccagttttttggaagacggagatgtgattaagggagctttttatctggttaccaatggtggagagagagaagtcccttattcttttcgtgtggaactgagtacgtcagggaaagcattgagcgacttaaagacggcggaggatttcgctgcgacagcgaagaacgactatgagacagcgcttcgcttatttgaatatagagatttctacgaggcccccttcatgaaggatctgcatgtgagggccctttacggtggtttaaaaggaagaccggacagaaagaaggaactggaggaattcttaaccggtcttggcgtcaaggagccggtaaaactgtccgcagacgagagcgaacggcggtttgatgagccggcaggagtaattgaggaacgcataacggtaaccagaagctgctggggatacgtaagcctggaggtgacggctgactgcgattttatagagattccggtgagaaatatcggggaccaggattttaccgatgacatctgtgagatcgtctaccggatccatccgggacgcatgcatcagggcttgaaccagggccgtattattataaccggaattgaagagcgtttcgtggttcccgtgactgcgatggtgaatccgggcggaggtatttctgcggaggatgcctacacaaaggaagcggtggcagcgtatctccatctgcgtctgcagaaagaggcgggggaatatgaggaagctgtgctccgcgttccggcggacacggatgagggggacgttcctcataaccggatgcttcgggcgctggacgagatcgaagagatgaaaggacagctggaagcgattaagcttttaagggctgagatatacctttcagacggcagggaaagccaggcggcactgctgatggacgaatgccgggagaagatcctggcggagcggcaggaaaagctggaactttactgttactatcagtatctgagactgattctgcagccggatgagtaccagaaagaatcgctggtccgtctgcttagaaaatatctggaggagaatccggatctccataatctgttcctgattctcttaaaactggaccgtcggatgagtgagaatccgggcggagccttatccatgatgagacgccagttcgaagcgggcatgagaagcccgtttctctatctgcatgcctgccggctgctttcggaggagccggatctgatccggagcattggcccgttcgagctgcaggtgctgtcctttggcgccagatacggtgccgcagggaaggaatttgcgctggcggcggcgaggcttacgctgacctccagacattttaaccggcttcactacagggcgctgggacgcctgtatgagaaatatccggaaaaggaaatactggaagcagtctgctccattctgatccggggcgagagcaggagcgcggaatcatttaagtggtatgagaagggaatcaaagagggaatcagcctgacgcggctttacgagtattatctgtatgcgcttccaaaggattaccgctatctgcttcccaaggaagtgctcctctatttctcctacggcggaaatgaactggaccgccacagcagggcgctgctctataaaaatgtactggtttatttaaaggaatcagatccgctgtacgaggcatatgagcgcgacattgaaaagtttgccacagagcagctgtttgaatcgagaatcggaagtaatctggcggttatttacgaacacatgatttataaggatgtcattgacctgcccatggcaaaggtgctgccatccattctgcgctcttaccgcgtggagtgcaaaaacattaagatgaagtatgtgattgtctgttacgaggagctgcaggaggaggacgcctttcttctggatgacggtgtggcatacgtgcctctgttttccgaacacagcattcttttgttccaggatgcctttgggaaccgatacagtacggttccttacgagaagacgccggtgatggacaagccggatctggaagcgcgctgttttgaactgtatcccgatcatccaatgctcagactccgggcgtgcgatgaggttttaaagaggggaattgcagatgagaaggaggcggagatgctggaggatgccatggaggacggcaggcttcagccactgtaccagagacttctgctttccaggattatcgagtattaccagcatattccgcttcaggcggcagatgaagacagctccgggggagacacgtatctggtgcgtcttgacaagcgtcttcttacgaaggaagagcgccagggaatctgtgagacgttaatcagccgtaattatatcgaagaagcctttgatatgatacgggaattcggatgcgaggatattcagagcaagcggctcttaaagctgtgtaccaggatgatacttaagaatctctttgatgaagatccgctgcttcttcatctgtcgtaccgggtatttctggaaggcatgagcgacagcgtcattctggattacctctgcgaacactacaacggtctgacgaatcagatgtaccgggtgcttttacagggaatttccgagcatgtggagacgtatgatcttgaggagcgtctggtggcacagatgatgttttctggctgtacggagaccatagaccgggttttcagcctttatatgaataaaaagaagacgagcgacaacatcgtccgggcttattttacgattaagagttcggaatatttccttgaagataagactccggacgacaaggtttttgcctatctggaaggcgcggtcaacagctctgcggataaggagaggataccgacgatctatctgctggcgttgaccaaatattattcagagctttcctcgctggaggaggagcagaaggaactgctgcgaagcacgactgcggttctcttagaggcggggctggtgttcccgtacttcaagacgctggcgaaatacgttcccatgccggaggatatcatggataaggctatgatccagtaccattcggacaggaacgcgcggatcgattttgaggtacggattctgcctgatgaggaggaataccactgtgaggatatcggaaggacataccaggggatcttcgtaaagaagaaggtcctgtttgaaggggaaatcatggagtaccggatcagtgaactggaagacggccagtgggtgctgaaaaaagaaggaagcgtcagctgtgacgctgtatcggcggccggtgatacggaaagcagatttgcctgtttaaatgaaatgagcctgtgcttaagccttaaggatgaggaagggcttaagaaacggatgcgggagtatttaacgaagaatgctgccgcggaagaattatttccactgatgtagataaggggattgtcgatggacggattgataattggacttgatttatgtgatgcctataccaggctgtgctgtcacgaacgtgaaaaaacgtggtgtctgccgacggttatctgccggaagaaggacgatgacgagtggtatgtgggggaagaagcttacgcatacactctggtgggggagggcattattgtagacaagcttataaagatggtcatgaaggatggaaccgctacgctgggaggcgtgaaatacgagggaaccaccctgctgaagatctatctgaagaaaatactggcgctggcaaaggaggaatttttttccgatgaggtaaaggaactggtgatcacactggaaaaggtggaggtcaagctgatggacgcgctgatgtactgtgctgattacttagagattcccagagaacgggtacatattatcagccatacggagggctttgtctattacgttctgagtcagaaaaaggaagtatggaacaaccaggtggcggtcttcgatttatcggaggactcgcttcattaccatgagttaaaggttcagcgggggatgaagcagatgaccgtggtggcagaggatgaggcgctggaggaaagcttcaatctcgatattttaaacaccccgtccggaggaaagctggcggataagatcctcagctcctgtgcggagcggctgctctccaagaagctgttttcttccatttttctgaccggaaagggattcgagcgtcaggactgggcgggggatttcatgaagcttctctgctccaggcggaaggtttatatggatcaggagctgtttgccagaggcgcggcttttaagggcatggattatcttcatgagaagacgtcgtatccctttgtctgtgtctgtgaaggaaggcttcattcgacgatttcgatgaaggtactgcataagaaccgggagagccagctgatcgtggcggcggccggtgacaactggtatgagtcaagaagcagcgtggacttaatcgtggacaaccaggattacgtagagtttttagtaacccctatggacccgaagcagaaaaaactggtaaagattcccctggagggattcccgaaacggccggcgaggacgacgcgcgtggggatcagcgtgggatttttagatgagaagacgatggcggtggtccttaaggacaagggctttggggagctgttcccggcctccgatgccgtagtcagacaagaggttatgatatgagcctgatcctatgccggcaggagccggttaaacatcctttttatttcgaaggcctgggagtccacctttattcctcccaggagctttgctatgtaatctatcagaatcctcttctggtactggatcatttcgtggatgagcatttaatagaatttatccgtgacgagctggagatgggatttatggccgccaagctggaaaaatggcagcagagcggagaagacgcggacgaactcctgtttttaattctgacggaatgtgactattacaatgcggctgagattaaacatttccgtcagaagatcgagacctaccgaaagatgtctccgcacgaatttgccaaggccaaagccgattatctctttacgagaagacagtacggcaaggcggttgcggaatacgaggggattttagagatgcccaaagagtcttctacagacgacgcattttatgcaaagatctacaacaacttaggggccgcctatgcccggttattttctatggagaaagcgtatcaggcctatcagaagtcctttgatctggcaaaaagcggcgacgtgctgaaacgcatttactacttatcgaaatggaatcccaatctggtcttaaaagaccgtttccggactctgattacggaagacgtaaagacaggatgggacgaagagatgaagaaagcggaagaagcagcggagaaggccgagagtttagaaaaactagaagagttatttctaaaagatccaataaagcgcatgaaaggcgccgccgacatggtaaaaagctggaagggggagtaccgaaacatgatatagcactgagcagtgcgaaaaaagccataagcaaatttacgttgtgcttgcacataagtaaatttgcttatggcttttttcatagggcgaacgcccgtcagcgagatggagcgaagcggaatcgagcggccactgcgggccagcgggcaacacaacagaccagcgggcaacactacaaaccaggctctaaaagaagttcacattcccccttgacattttcttcctcatcaactaatatatagataatctacatataaagatcatctatataaaaaaccacaaaaagaaagtgaggtcccccatgcctatcgacaaaagcctgatctcaggcagcacttccatgcttcttctaaagcttctaacggaaaaagacatgtatggatacgagatgatagaaaccctccggaagaaatccaacgatgtatttgaactaaaagccggaaccctctaccctcttttacattccctggaacagaaaggatatttaacctcctatgaagaggaggctttcggcaaggtacgcaaatactacagcatcaccggcgagggaaagcgttacctaaaaggaaaagaagaggaatggaagcaatacgccggggcggtatccggagtactagcactgcattgcataaatccctgcgctatagcacccgctatctacgccaggagcacgcccgcgaagctagacgtagggtccgctacgccgtcgcttcgcggacgcacacctgacgcagatatcaggcactataacccagttatttatgcaacgcagtactaggaggtgcagtctatggaactttctgaatatcttgataccgtatcggagcagattcgttgcaaaagggccagaaccatggtcagggaggaactggaaaaccatgtgcaggaacaggcggaagcatatgaggccgatggcatgacggctcctgaggcgatgagagaggcggtccgccagatgggagatcctatagagacgggaactgccttaaaccggattcaccgaccgcaattggaatggaaattcctcattctggtgcttctgttaagcgctttaggccttgcgcttcaatacatgacatgttataccggacttttcggaggtttttccagcgatcttgcagactatttctggaaacgccagtgtttctttaccgtcgcagggctcggcgtcctcgccgcagtctatatcgtcgattacacgatactcggccgctatcccctccttttgtggtttggttactttgctgttatatttatcattgcaaatacccataccgtaatcatgggaaaagtgagaatctataactatctgacactgtttttgcctctctacgcgggggtgctctacaggttccgctcaaagggatacggagcggtggctgtctgttatctcctaagcttcatgccgtttttcgtgggactgaagacgatactggtacacggcagcctggagcttgccggcggctgtttcctgcttctgctgattgccgtgtgcaaaggaatcttccatgtcaggaagacccggaccatagcagcactgatcgctctgcctctgatcacgtccctcctcctatactggaagggggctgatctggggctgctgcatcattaccagctggccaggcttcagtacgtgttcagtccggatatgcttgattacaattccaatggagggattattccctatctttgggagtccgtctccggttttcgaatgtttggctcatcggcggctccggtgccgaaggcaatgaaatccttaaactgcgactacgttgtcttttttgtttttgccaaatacggtattgccgccggaaccgccatgctgtccatacttgccgtcacagcggtgaaggcgttttccatatcgcggagacagaagaaccgccttggatttctagtcgggacggcgtgttccgtggttctgaccattcagatgatggtctatgtggcggccaatttcggcgtaccgctggtagaacccatgacgattccgtttctgtcatacggagggcagagcacccttgtgaattacatattgctcggactgattctcagcgtccacagaaacaaggatattgtctctgaaagacatggaacccggggaaaatggaagatacggctggaacggatagaatcgtaagtggaaaaaactgctgtgatatgatacactaaagcctgtagaatctgaacggtcatactgagagcgaaccgttctgacaggaggatgctatgggtgataatatatggcagaacgtatttcaggagatatttgaaaagaatttggaacgaatgaaaaaagaaccggaaactgcgggactcaataccctgtttgacagtgaaggcgcatatgaacagctgacgatcggagaggtgcgcttaaataccggcaggatagagattggagatccgctctgctatatgaatacaaagtattcctgtacgctggaggagacggtggagccgggaagctatccggtatccctgtctgtaatcgatcatccggtctttggattccgttttctggcggcgaaactggacgtaaatggaaagacgccggtccgctatgaactggccatgcctcagggctgtacgattgaagataaggataaaccgggagtgtttgccatgttcggcgtagacacggggctggcctgtatctgtgaccgtgccgtgtctgccgtctatgatgatttcataaaagaatggcgcaggaagaatccggacaaaaacctctatgacgactactttgaggaggttatgaaggcttatgcggaagcatatccccgttatcagcgggaggacggcgattatctggactggtgcccgccgggaagtgatggaaatttgattctctttaccagtggtttcggtgacggtgcgtacagcggctactggggctttgatgagaatggggacaaagcgtgtctggtggtccgttttatcgacccggaggcctacgacgttcccatgccggagcttccgaggcgtaaaaagttcttcatgaaggcggaagagataaagccgctgcttaagagcgggcagtttggaatcgctacagacaagattatggtggaaggctctaaagtgggttatatggtgcgcaatgaaccgcaggaggaacacccggaggacagcggatggattttctatgagggatcggaagaccgggaatattgtgaggacagcgggaatttcggactctatgatctgaacacggtggcaaactatgatcccgatatcattccgctgcttgacgcccccgcgggcatggcatttttccgcggtgatgacggggaattctatgtggatgcgggtgtttaagcttacacttgaaaatgttacgaatcgtaacattgagatcctggccgaaggacatcagattattaacagacggccagatgacgcggttaaatctgaaaataatatagaaatgaccagaatcaggaccaacattctcgaagaagaaatttaaaaaataaaaagagcgacagggatttaagttttttatacttgatgccacagagcaaaattctatttacaggggttgacaaatgattaaaaaacccctatgatatcaccataaagaaaaaggtaaggaaaaagaggagtatgttcataaccctgacagagaaaaccattcaccggctgaaagatggttaaggaagtgtgtgcagaaggtagctttggaaccggagtgctgaaatgcagtagttgtgttcagtaggtgctcacgcgtggtttgcgttaaagaccgtgagagctgcggcacagtctgtcgcaggaaaaaaggtggtaccgcggatgattcgccctttgcatagatatatgcagagggtttttttgtgcagtacgaagttgctcctgtcggacagaattgagccagacagggaattttgaaaggtttcagaacttcatgaaacagggcagacagccttagaaaaacagcctcaaagaaaagtcttaggaaaaaaattcagagagaaaacagataaggagagtactatgaaagaactggaaaaaaactataaccctgccgaaattgagggcaagctgtaccagaaatggctggacaaaaagtatttccatgcggagcctaatccggataagaaaccatttaccattgtgatgcctccgcctaatattacaggccagctccatatgggccatgcgctggacaacaccatgcaggacattttaatccgctacaagcgcatgcagggatacgaggcgctctggcagcccggcactgaccatgcggcgatcgccactgaagttaaggtcattgagagcctgaagaagcagggcatcgataaggaagatttaggccgcgacgggttcctggaaaaatgctgggactggagaaaggaatacggcggacgcattatcaatcagcttcataagatgggctcttccgcagactgggacagagaacgttttaccatggatgagggatgttcggaagcggtgcaggaagtatttatccgtctgtatgaaaaaggctatatctacaagggctccagaattattaactggtgtccggtatgtcagacttccatatcagacgcggaggtggagcatgtagatcaggacggatttttctggcacatcaattatccggttgtcggcgaagagggttcctttgtggaaatcgctaccacgcgaccggaaacactgctgggagatacggctgtggcagtcaatcctgaggacgagcgttatacaaacctggtagggaagatgcttgaactgcctcttacaggacgcaccatcccggtgattgccgactcctatgtagacaaggaattcggtaccggctgtgtgaagatcacaccggcccacgaccccaacgacttcgaagtgggaaaacgccacagtcttccggaacttacgattatgaacgatgacgcgaccatcagcctgcccggcagtaaatacgatggaatggagcgttatgaggccagaaaggccattgtggaagatttaaaggaactggggcttctggtcaaggtggttcctcatacccatgctgtgggaactcatgaccgctgtaagaccacggtagagccgctggtgaagcagcagtggttcgtacgcatggaggagatggctaagccggccatcgaggcgttaaagactggaaaactgaaatttgtgccggagcgtttcgacaagacgtatctgcactggctggagggaatccgcgactggtgtatctccagacagctgtggtggggacaccggattcccgcctattactgcgatgaatgcggagagatcgtcgtaagcaaaggccagccggagaagtgcccgaagtgtggatgcacgcatctcactcaggatgaggatacgctcgatacgtggttttcctccgctctgtggccgttctccacactgggatggcccaaagagacagaggatttaaagtatttttacccgacagacgtgctggtgaccggttacgatattattttcttctgggttatccgtatggtgttctcgggaattgaacataccggacaactgccgtttaacaccgtgctgatgcatggcctggtcagagattccgaaggacgcaagatgagcaagtccttaggcaacggcatcgatccgctggaggttatcgataagtacggcgcggatgcgctgcgtatgacgctgattaccggcaatgctcccggaaacgatatgcgtttctactgggagagagtggaagccagccggaactttgccaacaaagtatggaatgcatcccgctttatcatgatgaacatcgagaaggcgcccgacagccgggcagaactttctgatctgaccatggcggataaatggattctctccaaggccaacagcctggcccgcgatgtgacggacaacttagacaagtttgaactgggaatcgctcttcagaaggtttatgactttatctgggaggaattctgtgactggtatatcgagatggtgaagccgagactctggaacgaggaggatacgacgaaggcggcggccatctggactttaaagaccgtactgatcaattccctgaagctgctccatccgtacatgccgttccttaccgaggaaatcttctgcaatcttcaggacgaggaagagtcgattatggtatccgcatggccggagtataaggaagagtggaattttgcaggggaagagcatgcggtagaaacgatcaaggaagcagtgcggggcatccggaatgtacgtacatccatgaatgttccgcccagcaagaaggcaaaggtatacgttgtatcggagaacagtgagattctggatatctttgaaaacagccgcgtattcttcgcaatgcttggctatgccagtgaaatcgtactacagaaggataaggaaggaatcggtgaagacgccgtatctgcggttattcatcaggcagtcatctatatgccgttcgctgagctggttgatatcgagaaggaaaaagagcggttaaagaaggaagaggagcggctgaccaaagagctggcccgcgtaaagggaatgctgagcaacgagaagttcgtaagcaaggcaccggcggccaagctggaggaagaaaaggccaaactggaaaagtatacacagatgatggatcaggtgaaggagcgcatcgctcagttaggcgagtaacctgtccccacaaataaatttttataagaaaagagtcgaacccggcggaaatcattctgccgggttcgactcttttctttttggaaggcggaaagtactcccgggctgtatttggcagaaggaggtaccgtctgccaaatacagcctggaatccggacacgcgccggcggagttgtgatcaggagaaaaacggcaggagcaaatggatgttcgaatataaactgtcgaaaaagaaagaaaataccgggaaaaaggcgatgaaaaacaggaatcagggccgtagatttgacaaaatctgaaggtctctctgactataatgttcatacagggcaggaggtgagaaatcttttcgtgacggttgacttatatattgatgtgttttttgtcataaacatgattctggattatcttgtgctttccataaccggaaaggtgatgagataccgggcgggcagatacagaaaattggcaggcgctgctttgggagcagcctgggccgccttatgcgcggcatttccgtccattccccccgcagtctctttttttatgacctacgcagtggtcagctgtctgatggtggcgactgcgtttggtgtaagaaaaaaacgggagatgggcagggcagtagcctgcctctatctggtaaccgtcatgatggccggagtcatgcaggttctctaccagcatacgatggccggttattatatagaacagatccttcgcggaaacagccgggcggccatacccttttaccggcttctgctgctggctgctggcgcatattttggcgtgaggggggtgttgggcttcgttttggaggccagaaagaaccggaatcacttttatgaagtgacgatgcattacagagggcggaaaaagacggtgacggcgcttctcgataccggaaaccggctgtatgagcccgtgacgcaccggcctgtccacgtggtgacctacgaggcgcttaaagagctgtgcgagagtgtgtcctctgttatttacattcccttcgggagtgtgggaaagaaggaaggcgtaatgcccgggattttcctggatgaaatggaaatacgccagggcagtgacgtgaaaattatagaaaagcctctggtggctgtctgccgccgtcccctgtgtgcagacggggaataccagatgcttctgcatgaagattagtttccgcattcaaaagtggtgtgatccatttttgaatgcggaagcatccggcggatgtgcagcgcgccccaaggtattatgtcatgcatgcatgacggcgttcacaccaattcgccgggcgaattgattaaaaaggagagattaccgatatgatattaaaagtttccgtaccaaaccgtttccagtttaaagccgtaccaacctttaagacgctgatgatgccgaagcagggagagattcattacatcggcggagccgacattcttccggccccgctggataacgagtccgaagcgagagtgatagccatgctgggaggcgaagatgaccagagtgcgaaatcagagctgatcgaacataatctccgccttgtcgtctacatagccaaaaaatttgacaacaccagcgtcggcgtggaagacttgatttccattggaaccatcggcttaatcaaggcgatcaatacctttaatcccggaaagaacatcaaactggccacatacgcctcccgctgtattgaaaacgaaattctcatgtatttacggcgcaataacaagacgaagatggaggtttccatcgatgagccgttaaatgtggactgggatggaaatgagcttctgctgtccgatatcctgggaacagacgaggatgtgatctataaggacttagagaccgaggtggagcgaaatcttttaaattccgctatcagccggctgagcccaagggagagaaagatcgtggagcttcgtttcggcctgtcggatgaggagggggaggagatgacccagaaagaggtggccgatttgcttggaatctcccagtcctacatttcccgtcttgaaaagaagattatgaagagactgaaaaaagaaattgtgcgttttgaataatggcgggaataaatacttatccgttttacttttaaaataattccatttatagtataatcagaaatgtggcacgtcggagaggcagcaggctttccgggtgccattttttatgatatatttcaatagattttcgcaacttttctgctgcagaaaacgtctaacagacagaagaggagagaggaggaaaaatatttgaagaagaatatagaagctgaagctgagcaaatactcctgaccaattatgaaaagtattatcgtctcgcctacagctatgtcaataacgaacaggatgcgctggacattgtccaggaaagtgcgtataaggtgatgaaagatatcagtaaggtgagggaaccggattatctgtccacctggatctaccgtgtggtgatgaatacggccgttgattttctgagaaagagacagaaggagagcatcggcttagagggcgtggagattccccatgaggatgtctatcacgaggatgatcccatggaactgctgaaatcactggaggaaaaggaccgcaccattgtcgtgttaaaggtgatcgaggaactgaagctggaagaaatcgctgtggtgctggacttaaatgtcaatacggttaaggcaaggctgtaccgggcgctgaaaaaactgagaattgaactggagccagagatgtcatagaaaggggactttatagatggaaaatgacggcagaagcaaattagaacagttaaaggaagcatatcataccatcccggtgccggcttcggccagggaaagcatgatggcaggaatcgaaaaggcaaagaaagaaaagaggaggagaaacgtgatacagtttacgaaaaagacaggactgacagccgcggccgcgctgtttgccattacagtaatggcaaatgtaagccctgtgactgcaaacgctatggaaaatattccggtgatcggaaccatcgccaaagtggtgaccttccgtacctttgaagatacaaaaaataattatgaggcaaagattgacatcccgcaggtatcgatcggagatcagtccagtgcagaggtcaacaagtcgatcgaggagtatgcaaaccagctgattggcgaatacgagaaggaggtaaccggggatcttgcaggtgatggccactactctgtgacgtccacgtatcaggtcgtgacagacaatgaaaaatatctgtccctgcgtatcaacacgactgtgattatggccagtggagcagaatatgtgaagattttcacgatagataaggcgaccggacaggtagtaaccctgaaggatttatttcggaataaagcggattatgttaaggctctcagcgataatataaaggagcagatgagggaacggatggcggcggacgattcgaacatgtatttctttgaatccggagaggatgctgcagatgatttcgatcagatcacaggagacgagagcttttactttaataagaacggagaactggtgattgtgtttgacgaatacactgtggcgccgggatatatgggagttgtggaatttacgattccgaaatccgtgacaggcgacagtttctgattcaccccgcggcgtgcaaaggagagacggaagcagcaaaacagggtggagactgaagatgctataaaacaggatatagaacgaaacaacaggcagctggaggaaaatccggctgcctgttgcgtaccatcctttgcagtgatataattttccggccgggaagctgaaactttttgccgtctgtgtttgtcaatagagcagatggaaactaatgcagcacagcatgcctgtgaaaggagacagaggacgaactatggaacacgatcattacgacattgtggtaaattatattattgcaaatcagaaaaagttttacaggctggcctatacctatgtcagaaacgagaacgacgcgctggatatcgttcagaatgccatctgcagcgcgctggagcattacgggtcaatccgggagatctcttatataaaaacctggttctacagagtgctggttcatgagagcctaaattatatcagaaaaaagaaccgggaaatcgcaagcggggaaccgctgggcgaggaggccgcctatgtggagccgggttacgaagagacggagggcttctttgaagaactggaccgtttaccggcagatacccagaatgtaatcaggctgagattttatgaggagatgtcactgcaggaaattgcggaagtgatggaactgagtgtaaacactgtaaagtcgaaattgtacagagggcttaaatcattaaaggaggagctggtgatatgagcagattgaaggacagcaagaacgtatacgacaatattccaatcccggaccggctggaggagaccgtggcctcggccattgagcaggccgctgcgcggaggaaagaagaccatggagtcccggatcagccggtgacagagaaacggaaccggaaaaaatggagaaggcggggtaaaatggtatccggctgcggactggccgcggcagccgtgctgacggtggtggcagccgtcggagtcaacaccagtccgacgtttgccgaagaaatgcaggggataccggtgattggggctatcgtaaggctttttaccgcggaatcatggcagtccgacaccggagatgccggaatctcggtggaggttccggggattgagatgattcgcggtgacacgaaaaatctggcggacgagattaatgaggagatcaaggcgaagtgcgacgcctacgcggccgcggccgtagaacgggcgaaggagtacaaaaaggcatttctggatacaggcggaacggaagcggagtggaaagagcatgatatccggattcgtgtatggtatgaactgaaaagccaggatgattcccatctgtcttttgcggtaagcggatccgaaaactgggtttccgcctacagtgaaacgcattactacaatatcagtcttacagacggagcgtatcttaccctggaggaccttttagggccggattacatcgaaaaggcgaatgagagtatacgtgccgccatcaaagagcgggaagctgattccggtgaggagttcttttcaatggatgagggcggatttgtaacggtgacggcggatactccgttttatatcaatgagaaaggcaatccggttgtcgtctttgaaaagtatgagatcgcgcctgggtttatgggacggccggagtttgagatcgaaagggaggtggataagagcggtctctctgaagatacgcttgacatacaaggtctatcgtgatagactttaaataaaggactactacgatagaccaacgtcaggcaatgctgtagatttcagggaggcatatgaatggaagaaaagaaaaaaacagaggaaaagaagcagacagaagaaaagaaactgtatgagagcgaataccgtttcatgaacgtaatctgggataacgagcctgtgaattccacagagcttgtaagaatctgcgggaaagagctgggctggaaaaagtcaacctgctatacggtcctgaaaaaactggcgggccggggctttgtaaagaatgaacaggctgtcgtatgctcgctgattcccagggaagaagtcttaaagtacgagagcgagacggtagtggacagaaactttgacggctccctgccagcctttgtgactgcctttttaaaggacagaaagctgacagagaaggaagcggaggagcttagacagatgatagaaaaggcggtgaagtaatggctgggaatcaggtgatgatcactcttttgaacatgagcatgactgcgggtttaaccgccctttttgtgatggctctgcgcctgctgtataagaggcttcccaagcggttttcctgtgtgctgtggatggtggtgatctttcggttcctgtgcccgttttccctccagtcggcgtacagcctgctgccgttttattcgaatcccctggagcagcggatcgtttatgaagcgacgccttccatcgattcgggagtcttttttatagaccgccctgtcaaccaggttctggaacagaccatggcggcatcgaatcacgttacgtcggtcaacccgatacagatccttctgtttgtgatgctggtggtctgggaggcaggaatgctggctttcttcctctgccatttcgcaggctatatccggctgaaatggaggctgggaacggcggtgaagattcaggaggccgatcctggtcaaggagccggaacatgcaggagaccggaacacgcaatctatgagtcggaccggattcccggcgcttttgtcatgggaatcttccgtcccgtgatctatctgccggccaatttaacggaggttgaacgagagtgtatcctaagacatgaacggatccatatccggcgtcgggactatattgtcaagcttttgggtcttctgatggtcatggtacactggtttaaccctatcgcccacgtaagcttccggctgttttgcagggacatggagatgtcctgtgatgaggcggtggtaggccagctgggagagggcggaaagaagcagtactcactggcgcttctgtcagcagcggaaaaagaaaacggggcgcgtctgcctctggcgtttggggagagccatacgaaatcaagaataaagaatgtgttgaactataagaaagcaggcttctggatcacgctctgcggcgtgactgtaacggctgcagcggtattgtgcctgttgactgtccgggaaaaacctgcggcttcggaggcggtctccatcattggaggcggagacggtcctaccagtatctttattgcgggaaaggatgacggcgagactccggcgatgcctgtggaactgccggacacttcctggctggccggacaggtattgggaaaagggatcgaaagtacgattaccatcgattacgcctccaaggatcagattatatttcacggaagctgcggcctgttcagttttcagcttaaagacggaaaatggatgccgaatttattcatcggaccggatgatgcgggaaccgtagatttagaggcggtgaccagtgcgctcgatgcggggaaaaaggaaccggaatcagaggacagcgtccatgcagaggattctttcatcggccggaatccgaccgccgggagttctttcatcgactacgatgtgacgaagcttgccgatggaagcattgccgtgctcggaggaatggggacgtccccaggcagcggagaactgacgggaaagctggtggatgtattttacggatggtaccatccggaggatatggtgatgcatcaggtttacttatttgccggagacggcacaatggcggagaataacagcggagagatcgaagagagacggtatttgtttacaactgacggcgccgattactttctgagaactccgcagacggctctggaatttgaactgcaggacggaaaagaaccggaaagccttcattttccatatgaccggctggaactggtgagagatgagggaggatatacacgggttctggatcctatggtgatcatgggacagccggaaaaccagaagatggttctggcagaaggcaggatctattattacggagccgggaaggcggatcttatgagctttaaatctcaatcgctgattggaatccgtactgacggcagtgaccgccgggtggcaggaatcgactactctgtgtgcaggggattgtcctatgacaacggctatctctattatgaaggctggaaaaatgccatggagtttccgcgcccgatctaccgcatgaagcctgatttcagtgagataacgaaactcggagattttaacggaaatttaataagcgtggtggatggaaccttttatatgctgagcgctgaaaaaccggccatcgtactgacacgggaaggccattttgatgaggttatgtattacgataagtgcggttatgatgcgaagaactatgagtgcgtggcggcgtccgcggcagacgggaagctcacgatgaagttcgagaatctgtcgggaaaccgggagtatgtgaattacgagattccgctggctcccaaagatacgtgggagaagactgttgtcaaaaagaaatagcagaaagaagcagataatccgggctccaggagaatctgcttcttttcttttggtgctgatgtagttttctctatcttttacgaaaggcaattacgaaaggtatcccttcatacttttaagcgcatttttttcgagccggctgacctgggcctggctgatgtgaatctcctccgccacctcggtctgggttttgccctcgaagaagcgcatgtcgataatgtgacgttcccgctcaggaaggcgcttcatggcctcatttaaggagatgtcctccacccagttctcttccagattcttcttgtcgctgatctgatccatgacaaagagtggatcgccgccgtcagaatataccggttcgtagaggctgacgggattctgaatggcatctaaggcgtaagtaatgtcctccttactgacgccgatttcatcagcaatttccatgatggtaggttcttttaaattcttcttcatgagattttcttttgcatagatggctttataggcggtgtcacgcagagagcggctgacacggatcgaattgttgtcccgaagatagcggcgcacctcgccgagaatcatgggaacggcgtatgtggaaaagcgtacgttctgtgttatgtcaaaattgtcaatggctttgatcaggcctatgcagccaatctggaataagtcgtccacattttcgttactgcctgaaaaacgctgtatgacactgagaaccagtcttaagttacccttaatatattcctctctggcttccatatcaccatccaggatcctcttaaataaggcttctttttcttcgttgtttaaaaggggcagctttgaagtgttaacgccgcagatctctactttgtatacaggcatgtctttccctccgcatcattctttttagtcataaaggaatgatgtacttattcggaggcttttatacgatgccagatttaaattttatttccattttctggcggcggtccgtaaagtgcctgtttatcgcaacgtctcgtgcttcaggtgcgcgaatgagcagataaacggtttaggcccgccgcatgatctgcggattttatttgtttttttcgtaaagaatgagaaggccttttaataaaagcgcctcatcgtaattgattttatgacggcagagcgggaggacggaaggggccagaccgcctgtggctacgaggcttgcggcctgtcccagctcttcttccattcggtcgatgatgccgtcaatcatggcggcattgccatagagaattccgtttttcatacagtcgatggtgttcttgccgatgacccgggccggcttatttaatccgatgtatggaagctgggcagcccggctgcttaaggaatccagagagacgcgcagccccgggaagatgatgccgcccgtataatttccggacttatcgatgacggacatggtggtagcggttcccatgtcgatgactatgatgggagccgggtaatccttaagggctgccacagcgtccacgatcaagtcgcttcccacggtcttcggattgtccatgatgatattaagtcccgttttcatgccggagccaaccagcatgggcgtctttccggtgatcttcttaactgcggagagaaccacatctgtgagcggcgggacgacggaagagacgacggctccttcaatcgaggaaatcggcagattatgaattgccatgatgtctttgatattaactgcgtattccaggtccgtcttcccctggttcgtggtgacacgttccacaaaccaggtacggctgttatcgataccgccgattacaatattgctgtttcccatatctattgctaaaatcataaatgtaactcctttccaaaatttagaggttatggtatactatgagcacttagtgaggtttttcacgaacttagtgcgagtcatacctgagtacttaacgaggtctttcacgagtttagtacgaatggtatactatgagcactaactaaggtttttcacgagtttaccacatttcaggcaaaataacaatgtaagcaggaataaaaagaagcgaggcaggaggcacttatgctgaaaggaaaacatgttgtactgggaattacgggaagtatcgcggcgtacaagacggccggactggccagtatgctggtgaaaaagggctgtcatgtccaggtgctgatgacagagaatgcgactaattttatcaatccgatcacatttgagacgctgacgggaaacaaatgccttgtagatacctttgaccggaattttgaattcagcgtggagcatgtggcgctggcgaagcaggcggatgtggtgatgattgctccggcttccgccaatatcattgcaaagctggcacacggactggccgatgatatgctgaccacgaccgttctggcctgccgctgtaagaaaatcattgcgccggccatgaatacgaacatgtatgaaaacccggttgttcaggataatataaagatttgtgaaaagtatgggatggaagtgatcaaaccggcggtgggctacttagcctgcggcgataccggggctggaaagatgccggagccggccgagctgtttgattatatagagaaggagatcggagcgcagaaggatctggaaggcagaaagattcttgtcacagcagggcctacaagggaggcgatcgatcccgtccgttatattaccaaccattctaccggcaagatgggctatgccgttgcaaaggctgcggcactgcgcggagccgatgtgacgcttataaccgggaagactgacacgcccaaacctcgttttgtaaagctgatcgagatcgaaagtgccagagacatgtttgaggcggtgacgaaagcggcggcggaacaggatattatcatcaaggcggctgcagtagcagactaccggccgaaatccgcaggcacggaaaagacgaagaagacggatggcgatctggcgatcgagctggagcggaccgacgacattttaaaatggctgggggcgcaccggaaggaaggccagttcctctgcggattttccatggaaacccagaatatgctggagaattccagggttaagctggataagaagaatattgatatgattgtggcgaataatctgaaggtggaaggcgccggtttcggcacagatacgaatgttgtaaccatcattacgagagagcgggatctggaactggagaagatgacgaaggaagaagtcgctgaccggctgctggatgaaattcaggccataacagcagaaaaataagagtaaaggaaaaaggggaaatcaacatgaatacagagaaaaaagaaattattgttccggggcagctgacaggaccggctttgcttaccggatatctgataaaagaggtgagcgtggcaccggacagaaagcggccggcagtgatcgtctgcgccggaggcggatactggcagagatcggaccgggagagtgagcccctggcgcttcagtttatggctatgggctgtcatgcttttattctcgattacagcgttgctcccaaccattttccaacttcagtgagagaactcggagaagcggttgcatatatcagggaacacgcggcagagtggaaggtggatcctgaaaaaatcattgcgtgcggttcttctgccgccggtcacctggtctgcagcctcggcgtattctggaaccgggagctggtctatgatgcgattggcagaacacctgagcagatccgcccggatggtatgatcctgtgctatccggtcattacaggcggcgagtatgcacatgaaaattcctttaaacggctcctgggggacgatgtgacccaggaacagagagacgctgtttccctggagaatttcgtgacggaagagacgccgggggcatttatctggcatacgtatacggacgaaaccgttccggtggagaacagccttcttctcgctgccgccatgaagcggaagaatgtcaactttgaacttcatatctatccagtcggcgggcacgggctttcactggccgatgaggagacggccggtaacggcttccaggtggtggaacagtgtcagagctggattcctctcgtgaaaatgtggctgaaacatctgtaacagacatttggaatcatcaccacatgaatcttgactttgtaatggaataataatacaataaaaaagattgacacgaataattggaggaaacattttgtcgaatataactgaagaaataaagaagagaagaacctttgccattatatcccatccggatgccggtaagacgacacttacggagaagtttctgctttacgggggcgcgatcaacctggcgggctctgttaaggggagaaaggcggcaaagcatgcggtctcagactggatggagatcgagaaggagagaggtatttccgttacctcctcggtaatgcagtttaattacgacggttactgcatcaatatcctggataccccggggcatcaggatttctcggaggacacataccgaacccttatggcggcggattccgcggtcatggtcatagatggatccaagggtgtcgaggcgcagacgatcaagctgttcaaggtctgtgttatgcgccacattcccatttttacttttattaataagatggaccgggaagccagggatccctttgaactgatggatgagatcgagacggtgctgggaatccgtacgtgtccggtcaactggccgattggctgcggccatgagttcaagggtgtttacgacagaaataaaaagacgatcacgaccttccaggctgcgatgaacgggcagaaggcagtcgatgccactgaggtgctgttgggtgatccgcaggtagactggctgatcggagaggattaccaccaccagctgatggaagatatcgaactgttagatggggccagtgacgagctggatatggatcgtgttggaaaaggcgatttatctccggtatttttcggatcagcgcttacgaatttcggcgttgagacgtttttacagcatttccttcagatgacgacaacgccgctgccgagactggcggataaaggcgtgatcgatccgtttgaggaagagttttcggccttcgtattcaagatccaggcgaacatgaataaggctcaccgcgacagaatcgcatttatgcggatcgtatccggaaagttttccgctggtatggaggtaaaccacgtgcagggcggcaggaaactccggctgtcccagccgcagcagatgatggcgcaggacagaaagatcgtggaggaggcatacgcgggggacattatcggcgttttcgatccggggatcttttccatcggggacacgctgtgtctgtccaatgaaaagtttgaatttgaaggaatccccacatttgcgccggagcattttgccagagtgcgccagatggataccatgaagcggaaacagtttataaagggcgtgaatcagatcgcccaggaaggcgccatccagatttttcaggagtttaataccggtatggaggagatcatcgtcggagtggtcggagaactgcagttcgaggttctcacataccgtctggagaatgagtacaacgtggaggtcaagctggagaagcttccgtatgaatatatccgctgggtagagaataaggatgagattgatgtggcgaagattcagggaacctccgatatgaagcgcatcaaggatctgaaggataatccgcttctgctgtttgtaaacagctggagcgtgggcatggtcctggaacggaatccgggccttaaactcagtgagttcggtaaaaactaataaacagatcaacaaggaggcagcagatatgagtaagattgatgtagtcagggcagcgatggtagaagccatgaaggcgaaagacaagcagaggaaagatgcattatccatgcttctttctgcactgaagaatttcgaaatcgataaaaaggatcacacgccgattaccgaggacgaggcaaatgcagttgtaaagaaagagatcaagcagtctcaggagacgtatgacaccgcgcctgcggaccgggatgacatccgcgaggaggcagcttaccgtctgtcggtttacaaggaatttgcgcctgaggatatgagcgaagagcagatccgcgagatcgtcacagctgtgctggctgagctggagatcgaaaagccggcgccttcagacaaagggaaaatcatgaaagtcctgatgccgaaggtaaaaggcaaggcggacggcaaggctgtcaatgagattctggcttccatgatgaaataaaagcggcgtaagcgctgcaggaaaggataagacatgtacagaaaagagattgaggagtttgtcgaggcacacagacaggagatgcttgaagacatctgtactctgtgccggattaacagtgagaaaatgccgtataaggaaggcatgccatacggcgagggcgcgtttacggcgctggctgaggctctttccatggctgaaaactacggattctccatcacgaattacgataattacgtaggaaccgtggatttgaatgagaaagagagccagctggatattctggcccatctggatgtagtaccggctggggaaggctggaaggagacggaaccgtttgaaccggtggtaaaaggagataagctctttggacgcggtaccgcggatgataagggaccggcagttgccgctctctacgccatgagagccgtaaaagagctgggaattcctcttaaaaagaatgcacgcctgatcctgggaaccgacgaggagtgcggaagctctgatatcgctcactactatgcaattgaaaaggaagccccgatgacattttcaccggacggatcctatccggtggtgaatacggaaaaaggcggattaaacggtcatttcaccgcttcctttgccccgtctgacgcgctgccgaagctggtttccgtggaagccggtattaaggtcaatgtagtgcctggaaaagcccgcgccaccgtgcagggaattgacgtggaggtcatggagaaggctgctgaggaagtgagcggagaaaccggtatccgttttgaattcgatgtggaagaggatgcggcgacgattacagccatcggtgcaggcgctcacgcgtcgaaaccggaagagggcaacaatgcgctgacaggtcttcttgtcctgattcagagactgccgtttgcgccctgcgaacagatcagtgccatcggccgccttctggagctgattcctcacggcgacacctccggcaaggccctgggaatcgccatgagcgacgaactctccggagatttaacgctggccttcagcctgctgaccatctccgaccgtgaactggacggcacctttgacagccgctgcccggtctgcgccacgaaagagaatgttctggaggtggctaaggcaaagatggcggagaaaggctttacgctcttaaatgactccatgaagccgcctcatcacgtggatggagattctgaatttatccgcacgcttcttcgcacttatgaggagtatacgggccgtacgggcgagtgcatagccatcggcggagggacctacgtccatgaactgaagaacggagtggcctttggagctgccatgccggagacagataaccgtatgcacggagcggatgagttcgcagtcatcgaggaactcatcgtcagtgccaagatgtttgcacaggtaattgttgatctctgttcctgaccagtaacttaaaatccgtgagtctgacgaatttatgcttgacaaatggtatgatatggcgtaaaatacgcctcataagttaaaatcctagtcgaactataggaataggcgaagggagtaaccgctatgaaccagttaaaagccatgcagatgaatatgtacatgatgaacggcatgatgatgtgccgtatgtcaatgtgcgtaaaaaatcgaaaatgatatttcatttgtatggattgtgattggagtttatggcaaacagggagattgaatcttgaatcgctgtggtcgcaagtctgtgcagggcttgcggccttttttcgtagcaggaataaaaaagaaaggaaacaaaagacatgcagtcatcagaaccaattattcagctggtggggctgggcaaggagtttaggacggcaggcggaccgatcaaggcgctggacgacatcaacttaacgatctgccagggggaaatatttggaattatcggcctttccggcgcaggaaagagtactctggtacggtgcatcaattatctggaggtgccgacttccggcgaggttctgtttgagaacaggagcctggcctccatgtccggacgggatcagagaaaggcgagacagtccatgggcatgatcttccagcagtttaacttactggcacagagaaatgtcattcagaatgtctgcttccccctggagatcgcaggcgcatcgaagaaagaggcgaaagaacgggccatggagcttttggggctcgtagggcttgcagaccgtaaggatgcgtatccgtcccagctttcggggggacagaagcagagagtggcgatcgccagggcgctggccaccaacccgaagatccttctgtgtgatgaggccaccagtgctctggaccccaacaccacaaaatcgattctggcactgttaaaagaaatcaacaaatcaatgggagtcaccgtggtagtgatcacccacgagatgtctgtaatcgaagcgatctgcgaccgtgtggcgatcatagaccagagccatatcgcggaggtggggagtgtgacggagatcttttccgaaccgaagtcgaagatcggacggcagctgatcttaggcgacgcggccggacaggcggcaaaattcggaaagtccaggagggtgagaatctccttcgacggacgttcctctttcgagccggtgttatccaatatgatcctggcctgcaaagtgccggtgaatataatccatgcagagacgcgcgacataagtggaaccgccatggggcagatggtgatccagctccccgaggaggaggtcgacgcaaaccgggtagtcaattacttaaaaacagctaaagtaccatttgaggaggtgacggattatgacatttgatgctgctacatttgatatgctgaaggccgggatctgggagacgctgtttatgaccttcacgtcgtctttctttgcctatttaatcggtattccgctgggaattatcctgattgtgacggataaggatggaatccggccggttccgtggcttcagaaaattctcggtctggccatcaacctgcttcgttccgtaccgtttattatcctgctgatcatggtgattccgattaccaaaaaaattgtgggaacaacactgggagccaaagcagtgattccgccgctggtaattgcagccgcgccttatgtggcgagagtcgtggagtcgtcctttaaggaagtggatgcgggagtgatcgaagctgccaagtccatgggggcttccaccatgcagattgtatggaaggtgctccttccggaagcgaagccttccctgcttgtaggcgccgcactgtcagtgaccaccatcctgtcttattcggccatgtccggcttcgtaggaggcggcggcctgggagatatcgcgatcaaatacggctattaccgctatcagacagagatgatgttcgtgacggtggcaattctcgttattattgtacagattatacaggaggcgggcatgaagctgtcccgggtcagcgataagcgaatccggtagaaggcgtagtctggctgtaagattcagaaagtaatggccgtaaggcgttaccatagacacgatcacccgcacgttctgcgcgcgagtcaccgtatcaccaaaaagcgcaggaaactgcacaccaaaaaggaggaaacaattatgaagaaatcactttacgtactggctgccgcgttttttgcagcgggagcactgaccgcctgcggcggaaacaacaaggaaacgactgccgggacgacaacagcggctgtcacagaatccaaagagacggagagcgctgcaccggccgatgagacaacggcagaaaccggagaattaaagaagctggtagttggagcttcaccggcgccccatgcagagattttaaaggcggcaaaggacattttaaaagagaagggatacgatctggtaatcaaggagtataccgattacgtacagccgaatctggcgctggagtccggtgacctggatgccaactatttccagcatttcccatacttagagcagttcaaccaggaaaacggcacagatcttgtatccgcaggtgcgatccactatgagccatttggaatctatgccggaaagaccgcttccctggcagacttggccgacggagcacaggttgcggtaccaaacgacgtatccaacgaggcgagagcgcttctgctgctggccgacaacggtctgatcgagttaaaggaaggcgttggcctggaagcgacaaagaacgatatcgtaaagaacgataagaacttaaagatcatggagatcgaggctgcacagcttccgcgttctctgggtgatgtggacatcgccgtaatcaacggcaactatgccattgaggcaggcttaaaggtatcggatgcgctggcaaccgaagactcccagtcgatcgcagcaaccacctacggaaatgttgtagcggttcgcaaaggcgaggagaaatccgacgcaactctggctctgatcgatgcgctgacgagcgagacagtgaaacagtatattgaagatacgtatcagggtgccgtagttccgttattctaaacgaaacaggaaaattctgctgtatatcataccgtttcggataaaaatgaataaggtacaaaaaaagggaacagatcaggataaaacaatctgtttccttttttgtgtacagattcgggaacacgattttatttgggacgatttggcaagaaaaacttaattttacagatagtgattcgtattgtataataggtaaatatatacatagttacaaacaggaggaatgggaggcaggatatggaagacgacaggcagtacgaatacgatggtcctgattccgagcgggaaccagtgcatgagggaccggtgaccatgggagaaaagccggcagccgctggcggagcagccgcgggccgctgcgaagaatcaggcggcggaatcgggcagggattcgatgaaatggatcggtatccggatcaatacagcagacagcctgaggaatggacgcaggccggatatcagcaggaagaaaactatcaggccgaatatcggcaggaagagaattatcagaacgaatacggacagaacggataccagcagcaaaccggatattaccgggacgaataccggcaggcggtaaattcaggatataagcagccgcagagacagagcagcatggcattggcctctcttatcatggggattatcgggatcgttacctcctgctgctgttacggcgggctgatttttggcagtctgggaattttatttgcgctgttgtcgaaggcaggggacacgatggagggatacgccagggcgggtcttatcacctcggtgatcgggctgtttctggcggccatggctttgatatttgtatttggaatcatgagctcatcccttctgtcaggaggtgtatattaatgaagacaacatcgtcggatcttaaaaaacgcgcgaagctgacgctctcgggcaactatgggacggctgtgggagccatgctgattgtggacgtctttctgatcgttatttgcatggtttttatcggtgtatcgatggccggtaccttttcgataattggcggagcaggctacattcgaagcagtatgacgcgctcactggtcatgatgctggtgatctattttatcgccatccttctgatttatcttgtgatggccggaatccggagaatgttctatcatatgagtacaggccggccgtttgcactgggggacatgctgtttgcgtttacccacagaccccagcggtttttaggcttatattttattaatatggcattcggcatggctgcggggattccatactttgtggtgagtttctccgcgcgtattacaggatatattcccatcctgatggcgcttcagtttctgatgtatctgctgcagctcatcggaattgtcgtgtattcgctgtacttcaagatggcgggctacctcctgatggaggaccctgagcgaacggtgatcagctgtctgcgggagagcgcggctctgatgaaggggaataagggacgcctgttttatctcgatctcagttttatcggaatgtatttactgggggcaggatcctttggaattggatttttgtggattttaccgtatatggaaacgaccatgattcacttctatctcgatatcaatgccggacggaggcaggaagaggcctgttatgatcaggaaccgttttatgacggcagcagcggcttctacgagaacgtgacagagtaacaaattgtatcacacacaggaaatgcgcatagaatacactaaggaatatagaaggtgcaggctatgcgcatttcagatctcaaacaaaaagaagtgattaatatctgtgactgtaaacgcctcggttatgtgggtgatgtggattttgatatggatacgggctgtctcctggcgattatcgttcccggaccgggctgcttctgcggatttctggtcagagaaaaggagtacatcattccttacagtgacatctgtcaggtagggcgtgacatcatcctggtgaaagtagatctggaaaaaactgaggaaaaatgcaagatatagtataagttgtgcttgcgtatctatggattgtggggtatgatatacataattaaaaagtaagggatccggagccgggaaaactgtgtattctgttttgcggctcccgtattctgtacaaaaaaacagtggattcctccgctttgcagtgaaggagcggggaatcgccaacaggaggatagcgacgtgaaatgtccattttgtaatgaagcagacacaaaggtcattgattcaagaccggcagatgacaacagctccatcagacgccgcaggcagtgcgagaagtgcggaaagagatttacaacgtatgaaaaactggagactctgccgctgatggtaattaagaaggacgattccagggaagtctacgaacgctccaaactggaaaagggaatccttcattcctgccacaaacgtcccgtttcttcccagcagattgattccatggtggatgagatcgagacgcagatttttaatatggaagaaaaggaagtctccagcgctacgatcggagagcttgtgatgaaaaagctgcaggaggtcgatgaggtggcctatgtccgtttcgcctccgtatatcgtgagttcaaggatgtgaacacgtttatggaagagatcggaaaattattgaaaaagtaggacgaggtatgtttaacagattttatccggatgaagacgtggcctctgcgtatgatattccgtatgatgctctttataaagaaggagtcagaggcgtaatttttgatgtagacaacaccctggtgccccatgacgcgccggcggatgagagggcaaagaacttattctctcatctgcgggcactgggcatggacacctgcctgctttccaataacaaagagccgcgggtggcagcttttgcagaagctgtcggcggctctaactatatctataagggcgggaagccgggcgtgaagaattataagaaggccatggagctgatggggacaggcttacaaagcacgatttttgtgggagaccagctgtttaccgacgtatatggagccaaacggacgggaattaagagctttctggtgaagccgatcaatcccagagaagagattcagattgtattaaagcggtatccggaagccctcatcttatttttttatcgcagggacaaaaagaggagacagtatgataagcggaaaaagtaaagtttgcggggtcatggcgtatccggtggagcactccatgtcgccgcttatgcataattattattcggaacagacgggaacagatcttgcctatatccctctcaaggtagagccgggctgcgtggaagcggcggtgaagggggcttatgctctcaattttaccggtttaaacgttacggttcctcataagcaggaggtcatgaaatatcttgcggagatcgatgaggatgcaaaggccatcggcgccgtcaatacgctggtacggacagagggcggttacaggggatataatacggatgcggcaggactgaaacgggccatgacggaggcgggaatcgaaatccgtgaccgctcctgcattctgttcggtgcgggaggagcggccagggcggcagcctgtgtgctggcgaaagagggcgcggctgtgatttacgctctgaaccggagtgtggagaaggcggaagcactttcggagatcatcaatgagcggtacggccgccgggtgatgattcccatggcgctggcggattacggaaggctggaaggcagctcttatctggcggttcagacaaccagtgtggggatgcatcccaatgtggaccatgctccggtggaggacgaagaattttataggaagatcgacacggcagtggatattgtgtacacgccgatggagacaaaattcatgaaatacgtcagagcggccggaggcaaggccgtcggggggctggacatgctgatctaccagggcgtgattgcatatgagctgtggagtccggagaccgtgtttaccagagacatcatcgacggcgcacgagtcctgatgcgggaagaactggaggcagcgcgatgaggaatgtgattttgatcggcttcatgggggccgggaagacgactgtaggagagcggtacgggaagaaacacggactccccatggtggatacagactggctgatcgaggagcgggccggcatgacgatctcggagatatttgccagaaagggcgaggaagagtttcggaagacagagacggcggtccttcaggcgctgctttccgatacgcaggaaaaggtcatttccgtgggaggcgggcttcctctgcgggaagagaaccggaagctgttaaaacagcttggaacggtggtttatctggaggtgaatccggagaccgtgttaaaacggctgaagggggatacgacaaggccgctgctgcagggcggagacgtgacacagcgtgtgaaagagttccttgcggtccgcggtcccatataccgggaggcggcagaaatgatcgtggatgtgaatgacagaaccgtcgatgagattgtggcggagctggaagaaaggatgggatttgaatgaagttacttctgttaaacggaccgaatctgaattttctgggaatcagggaaaaaggggtatacggcacggaggattacggatatctggtacgtatgatgaaggagaaggcggaaagagaaggccatgagctggatatttaccagagcaactatgagggcggcttaatcgataagattcaggaggcttactacaacgggacagaagggatcatcatcaatccgggggcgtttacgcattacagctacgctctgagagacgccctttcatcggtggagattcccaaggttgaggtgcatatctccaatgtgcataaaagggaagaattcaggcatacatccgttacggcacctgtctgcgacggccaggtggtgggactgggactgaagggatacgccctggccatggactatctgaccggccgtgaatagaccggccgacaggtgcggccggcgtcatgtatacagaatttgaaaaaaagagttgaaaaagggattattatagtatagaataaaaaggattaagagaatttcaaggaggaatatcatttatgatatcagcgggtgattttagaaacggtatcacattagagattgacggtaatgtttatcagattatggagttccagcatgtaaaacctggtaagggtgctgcatttgtaagaactaaaattaaagacgttgtaaacggcggtgtagtggagcgtacgttccgtcctacagagaagttcccggcagcgagaatcgacagagtggacatgcagtatttatatgcggatggagatcttcataacttcatggatacaaacacttatgagcagatcgcactgagcccggaagtaatcggtgacgcgttaaagttcgtgaaggaaaacgatatcttaaaggtttgttcttataacggaaaggtattctctgttgagcctccgttattcgtagaactggagatcacagatacagagccgggctttaagggcgatacggcacagggcgctacgaaacctgctaccgttgagaccggagctgtcgtttacgttcctctgtttgtggatcagggcgataagattaagattgatacgcgtactggagagtatttatccagagtataagagcatgatgcgctgcccgcccggtaagccggtttcccggatgaccggagcgggatttgagggattatggtcccgacggcgtgaatgcagggaaaagacggtaaaagagactgataaatgctggcctggaggccaggatttgccgctctcttttaccgtctttttgtgtaactggaaagtgttcctgttacacagagtgaaaccattgacaaagtgggcaatcgcgcggtaagctgataagaaagagtgatggggaaagggaggactatatgtttcggattttgctggtggatgacgaggctcaggaacgggatggaatccggttcctgatcgaaaaatataagctgccgcttacggtggtggaggcgcagaacgggcagaaggcgctggagtatttgaaagagcatccggtggatattctgtttacggatgtgaagatgccttataaggatggtctggaactggcgaaggagacgtttcagtttaatccgggtatccggattgttattttcagcgcctatggggagtttgagtacgcgaagcgggccatggaggccaatgccgtcgattatctgttaaagccgatcgagctggacgagttcctaaaggtcatgcataaggtgattggcggcctggagcggcagagggaggagtctaagcaggaacgggagcagagggacgcttccatgaaacgggtgttttacaaggcgtttacgggtggaagcgtgtcggcagccgaccaggagatgcttacggagtactttcagaagctggggaaagagaggaaagtactggtaagcctggagagcgggcggaacatttttgagcagcaggaggatgtctttttgaaactgctccatacgtatatccgaattccctgtgagtatgtgaatctctatcccgattcatcggtggtgcttctggctgacgaaaaccggattgtgggcggagaactgcagaaacagctggaaaagctggtccgggacggaaaaacgcttcttgggacagaaatttccatcgtggtcagccgggaatttgagacagtggaagagatgaaccggcagatggatgagatcagccagattcggaagaatttttatggaacgggcggagagattacgtttctgtcagagattgtattgaattcggagtattatgccgcggaggtggagcggatcaaggaactgatgatcggcgccatcggggacagaaatgatgatcttgtgatcttatatggagaccggctggtggagacgatggtgggcggccatgtggtcagccggatctatgtacatcacgtcttttacgatattttgtcagcattttacagccagtacgggattaatgacaagccaaggctctttgagagggtggaacggctgctttcttacaaagacggggaggagctggaggtcaatttccgtgcggtcttaaacgaagtgctggctaaacggacggatgctgccggagacagtccgagaatcgtggagcggattaagaatattgtcagggatgaataccggaatgacatcggacttgaggatatcgccgagcgggtgaatctggcccctgcttacttaagctacctgtttaagaaggagactggggcgaacctggtcaaatatattacggattaccgcatggaacaggccaggaagctgctggaggagggggaactgaagatcgttctggtggcaaaggcctgcggatatgagaatcagccgtactttaaccggctgttcaaaaactattacggcatgacgccccggcagtaccgggagaagaatggaaagcagcagggatgaggatgaaacgattgctgaactggtattatggaagcgcttcaatccggaagaaactggtgatcagctatctgctgctgattacggtcccgattctggtattgggagtatactcgttttcggtgtcgaaacgcaatatggagaggcagacggaggaaaccatacggaataacgtgcggctgatggcctctgatctggaaacctcgctaaaaagagaaaatgataatatcaaatacttatcttataacgcgaaattccgccaggtgctgaaaaacagccggggaaaccaggtggaggtggcgcaggtgctcaacgaggtggttgagccgatcttctggtattttatcaccagtgataataacatgaagggaatcgagatctatacgccctatgtgagccaggaggtgggaagcttcttaaaaccggtgggtgacagcagcgaagagtcgtggtatcagtaccatcagaagaatttcgggacgctgtggacgtttgagaacggcagtatgtttgccaccaggacggttctggatgcgcagacggcgtcagagcccatcggcgtgctgaagctgactgtccatccggcgtcggttctggagccgatctccaataatacatttttaaataacggaattctccttaccgatacggagggaaagacgatttattccagacagacgggagcggaaccggcagatcaggctgttctggccggagcggaagcaggtgatctggcagacggcgaccagggagagtacatcgtgatgtctgaggcgatcagtaccagcggatggcgtctttattactatgtgacgaaaagcgaaatcacgggacagctgtatgagattctgaaatccacgctgctgattgtggggctgtgtctggctgtcagcctgtttctgatcggtattctctccagggttttaagcaggaggatactggaactgaaggagagcgcggaaaaggtggcggaagggaatttcaatctggagcttaaccataacgataccgatgaaattggaatcgtgtcaaagagcctgcagaccatgtgtgaccgtctgaatgagatgattaaccgggtctacaaggcagagctggagaagaaggccatggagttaaaggcgcttcaggccatgattaatccgcattttctgtacaactgtctctccagcatcaaatggaaggccatccgcaccggaaatgacgagatcagcgatctcacagggcatttggcaaagttctaccggaccagtctgaacggagggaaacagattaccactgtgggaagcgaactggaaaatgtaaaatcatatgtggaacttcagcgcatgacccatgagaacagctttgatgtggagtatgaactggatgagacgctgtttgaaacttccatgccgaatttccttttgcagccgatcgtggaaaatgcgattgagcacggcatgaattatcaggaggagattgaaggaagagggcggctgatcgtccggctggaggaagaggacggccatctgatcttcagcattctaaacaatggacccagggtggagctggaccggctggaggagatcttaaatacaccgggcagaggctatggaatttataatattgaagagcggatccggatttactacggtgcgggctgcggtgtctacgcctctgtcacggcagacggttatacctgttttacggtgcggattggaaaagaactgaaggagctgtctgtatagatgagaagttctaaaaatagtacaaggtttctaaaaaatttgttaaaagatcttcctccggaagatgataagatataggcatcaaagcaatcacaacaaggaggaaggtatcatgaaaaagaaagtattaagtgttctcttatgtacagcaatgactgcttcggctttggcaggctgcggaggctccgggacgtccgggacggaagcgcccaggacaacggggggagaagccgtgacggaggcagccggcaataccggtgacaaggcgggaacggacaaggcgaagattcgcatgacctactggaacagtgaggatacgatgaaggcgatgctggattatctggcggagacacttccggatgtggagatcgaataccagtttatcgacaactccaattacgataccatcgtagacacccagctgtcggcaggagaggggccggatatcatctgtgaatctccgggatcttccttaaagcatgcgagactgggatatttagagccgttaaacgatctgggcgccaagtattccagcgcggggaccagcgtctattcctatgacggcagcatctacgctctgccggggatcagctggtttgagggaatctattacaacaaggccctgtttgaggagaatggaatcgctttgccgacgacattcgatgagtatatcagtgtctgcagggaatttaaggagaaaggaatcacacctctggcggcagggctgaaatcatgggagccgatgttaaaaaactccatggcgttcgtgactgctgaatacttatccacagacgcgggaaagaatttcggttccgattaccgcgagggcaaggctaaaatggaaggaacctgggatccatacgtggaaaaatggtcagagatgatcacggagggcgtttataccacagatatgacgggaattgaccacgatcaggcattagagcagtttgcaacaggcggcgcagccatgttctgctccggaccgtgggatttagacaccatcacaagcaagaacccggatcttcagatcgatatgatgccgttttatggtacggcgaggagcgacggatggctgatcggcggtcccggatgcggctttgcagtcaacagctcgtcttccaataaagaagcagccatgaaggtagtggaggcaatctccacggtggaaggccagaaggcgctgtgggaaaacaatcagggcggttcctcctatctggaaggcgcatccttcgatttaccggacgcctatgaaggcgtatcaggaactctggccgccggcaatgtatactgcccgtggaatgaatggggtgcggccgccggtgctcatgagacatacggaaccgagatgcagagctacctgttgggttcccaggatttaaagaccacattgtcgaatgtggatgcggccgtggcagagcttttggaaaagtaagacccggcaggtaactgacgaccgataccgattatgggagcggtaatccatgctgaaaagaatattggcgtacgcatgggttacgctccctttttgcgcccatttttgggcaaattgaagagaaggaggggtatgaaatggaacagattcaaagaaaaaagaggcaggcagggacgctgggaaagtatttctacgtgtttatcctgccggctttcgtcgtatatcttctgttttccatcgttccgtttttatatacgttttactacagcttcaccgattatacggatatgaatccggtcaacttaagctttgtaggccttaaaaattatataaaggttttcaatacgccgctgatgattacggcgataaaaaactccgtgctctacgctattatgctgacgtcgcttcagaccatacttgcgctgcctctggcggtgctcctggataagaagctgaagaccaggaacctgctgcgggccgtattcttctttccggctgtattcagttccctgattatcggctatctgtggaattttatcatgtcgtcgtcggattacggcctgatcaacaatctgctgcaccagctggggcttgggacctttaatttcttcactgctgaccgggcgctgttttccgtcattttaacccaggcatggcagtggaccggctgggccatggtcatctatctggccaacttacagagtatttcaccggatctctacgaggcggcggatatcgacggagccgggggaatcaagaaattcttttacgtgacgctgccgctcatgtgcccgtcagtcaagatcatcgtggtaaccggcttaatcggaggcatgaaggtgttcgatatcatctattccatgacatcgggcggtccgggcaatgcgacggagaccgttatgaccgtcatgatgaaaaaggggatctcggatggcttttacagcaccggatcggcgttcggcgtgtgtttctttgctatcgtgctggtgatcagcgccgtagtgacaaaattaatggggaaatggagtgattcgatacaatgacgaagagaaaaagaaatttatatattctggaagcagtcatgctcgtgattgcggtgatctggtttatcccgatatactatctgatcgtaacgacgcttaaaaatccccaggaggccacggccaatcccctgggactgccgattcacctggaaatcggaaattacatcaaagcatggaccaacatgcagttcccgagggcgtttgccaacacgctgtttatcacggccacggctgttgtcatcatcgtcgtgttcggtgccatggccggatacgcactggcgagaacgaagacgaaaatgggaaaccgtatgtttttattcttcctggccggactgatcgtgccgtttcagatgaacattgtcagcttatataagattgtaaagagccttcatttgatgaacactccgtttgcagtgattctcgtcaatgtggccatcaacacgccgcaggcggtattcctgtttaaggaattcatagagggcacggtgccgaaggagctggaggaagccgcggagatcgacggctgtacggtgttccgcaagtttttcagggtggttctgccgctgctcacaccggtaatctcgacggtcgttatcatcgttacgctgaacgtgtggaatgaattcatgacgccccttctgttcctgcagagccgcgaaaaggatgtaatccttcaggaggtgtcccggaacatcgggcagttcgccaccgactggaccgcgctgttccccatgctgatgctgggtgtggcgccgctcatgattttctacgtattcatgcagaaatacataatcgccggtgtggctgccggtgcagtgaaaggatagagaaaaaatggataagaaaaagtcgggaacgcttcatgacagcctgatggtgattgttccgcaccaggacgatgagatcctcatgtgtgccggtatcctctgggaggccgctaaaagaaagattcccgctgtcgtcgtgatggtgacaaacggtgattacgggagcagtgatctctctattggaaggagccggttaaaggagacgctggccgggcttgccatgctgggaatcgatgccgggaatgtagagtttctggggtatgccgacacggggatgccgaaggaggaaagctttttaaacggtctctatgaggagacggacgcagggagacttcatagatcccactgttcggaggagacgtacggtctggaagaaaaggatgaataccacaaaaaacggtggggagcgcatgcgccatatgacagagcccatctggccgcagatttgtacggcgtgatagaggaacaccggccggcaatgatatttaccacatcagagtttgacactcacggggatcacagcgcactctgcctttttgtccgtgacagcctggtccggatgaaagcggaggcagatacagaatgcggacttccccgtctgtacagcggaatcgttcattccctggcgggagatgagaactggcccgtcagaaccacggaagtggggccgtatacggaaccggaacagtttgaagagacatcccggttccggtgggaggaccggatcagctttccggttccggagtgcatgaggacggaagtcagagaggacaacttaaagtatcgggcgctttcctgtcatgttacggcgttaaagccggatgcggtggattttttatatgcatttattaaaaacgaggaacttttctgggagattaattactgaaggagcgagacagaatggagattaataaacagccgatctatcccgtcgaaccgtggacggtgacggaaacggaatttaagatggagacaaattaccggaatgagacgacattttctctgtccaacgggtacctgggcacgagaggaaccctggaggaggggtatccgtttacggcagatgagggactggaaggcaattttatcaatggattttacgagagtgaaccgatccgctacggggaatggaactacgggtttccaacggagagccagtctctcttaaaccttcccaacttaaagacgatcaggatttttctggaaggggaggagctggatatcagaacggggaaggtgtccggctggcgcagaacgcttcatatggatcggggaacggtcaccaggtccttcgactggacttctccgtcgggccggaccgttcatgtggaaacagcacggctggtaagctttgaagtgaagaatttgatggcgatgtcctgcgaagtgacgccggttaattttgacggggagatcacatttttgtcggtgctggatgcggatgtggagaatcacacgcggaagacgaatccgctggtggattacggcccctttggccgctgtctgattacagacgtgatatcagcggatgaaaccatgctgttttatcagggaacgacggagcacagcgggattaccatggcctgcggcagtgtgatgacggtgaaggcggggcaggatggcgcgctggatcgtgtgacagaggaaggcagtgccccgcaggaatggtggattacggaggatggactccactgctgccataaactggtggtgcagggaaggaaaggccggaagattaccgcggaaaaacagatggcctacacctcctctcccgatctggaaaagagcgggatgaaggaattgatcctttctatattaaatgcagctgcagaaaaaggatttaagcgtacggcggacggtcaggaagcctgcatgaaagccatgtggaagcaggcggatgtggtgattgagggagatgaggccctgcagcagggcatgcggtttaatctgtttcatattcttcagtctgcttccagagacgggaaaaacggcatgggggccaaggggctttcgggagaggggtatgaaggccactatttctgggatacggaaatgtatgtgattccggtactgatctataccaacgccagtctggcaaagtcgcttctcggctaccgcttccgtacgcttaacgaggccagggcgagagccagggttctgggacacgagaagggtgctctgtatccgtggcggacgattaatggccgggaggcttccacttattttccgctgggaacggcgcagtaccatattaatgcggacattgcctatgccttcaagctgtatctcgatgtaaccggtgatatggaatttttaaaggatcaggccgcagaggtgctggtggaaacggccagggtctgggcggatgtcggctgctttgccgaagccaggggtggcaagtactgtatctgtgccgtgacagggccggatgagtacaacgctatcgtagacaacaatttttatacgaatctcatggcgagggagaatatccgggatgccggctgggctctggattcgcttcgtgaaatggatgagcctgcatacgaagcccttgcggcgaagctgggactgaaggaagaggagagggagctctggaaccggattgtggagaatatgtatttcccatacgatgaagaccggaaggtctatccgctggatgacggctttatgattcggaaaccgtgggatgaatcgaaaataccgccggagaagcgccacctgctctatgaaaactatcatccgctctttatcttccgccagcggatgtcgaaacaggcagatgccatactcggtatggtcctgcacagcaattactttacggaagaggagctgcggcgcaactacgatttttatcaggaagtgacgctgcatcattcgtcactctcaacgtgcatcttcggaatcctggcatgtcagatcggatacggggaagaggcgtatgcgtatttctcccagtccgccagaatggacctggatgattaccatgacaatttttatgcgggaatccacgcggcgaacatggcgggaacgtggcaggcagtcgtcttcggctttgccggcctgagagtcaaccggggcgttctggagcttcatcccatacttccggaaaagatgaagggatacgaattccgcttcttataccgcggcagcctgcttcacgtgcagaccggccgggagggaacgagagtgacgctgctgtcaggaaaccgtgttgaattatggctgggtgatacctgccatcagctggataaggagggagagtatgtctgcagttaaaccgagagccgtattttttgactgggatggaacggctgtttattccagaaaagcgccggccgacgcggccctgtccgccatgaagccgctgctcgcccaggggatcaaattagtgattgtcagcggaacaacgattgaaaatattgcaggaggacagattgaaacatattttactcctgaagagctgaggcatttatatctgggactgggacgcggcgcctataattacgcgtttgacgaggaaggaaggccgtacgtatttgcagataagctgccggaccgggaaggccttctggcggttcacagcatttgctttgatattcataaggaactgttaaaaaagtacgatttccctacggacatcgtgttctccaggccgaattactgcaaaattgatttgatggtgtcgaatcagagaggggatcagctgttccttcaggaaaatgaactggtgattctcaaagagagcttacgccgtcacgggattgagggcggcttagcaaagcttctggagatctccgggatgatcggagcttcttacggaattgcagtagcccctacctgtgatgcgaaatatctggaggtgggactctccagcaaaagtgataacgtggacacgattctggataagtttcagcgggaatttgggattctgccggaggagtgcagctactggggggatgaatatgtggggatcgaagaagggattttcggaagtgacagcttcatgatcacggagaagtcgagaacaggccgtttctttgatgtatcagaagtaccgggaaaacggccgcaggaggtaactgtgaccggaggcggagtggagcgtttcctggaatatttaagagaaataagcatataggagggatcaaaggggctgctgctccagtagataaataatctgctggagcagcagctccttttctgtaccaaaaaacatcaaagagggaaaaggttccgttgaaaaccggtgataaaaatatttttaaaacgaagttacagaaatattgataaaattcggaaaaaatgataaaatgtaactttaatgggaaataggaggataaacacgtatgaagagagcagccgcatgtctgcttgccctgtgcctgattctgcagggaccggcaagtctgatgacgagttttgctgatttcgggcagaggggagtggcatcaccgtcgaacagtgtatcggcgagtccttccagcgcatggaaagagaatgaaagtgaagggaaaaatggggaattaaaggtcgaaattcgtggagtccttcccgtgcagagggctgcggaatgggaattatttctgacgaaggatgaggaactgtccgatcagggcaccctgcagtttgaggccgtggagtcagccggggtctattcctccggcagctatacgtttacggatcttcccaggggaaagtaccagcttctggtgaaatcgttaaacggcgggtatgaggattacatacagaaaaatatttcaattaacggcgaccgggcgtcgatcctgcttttaaacgactacccggaaaaatacggctataccgggaataagatgcctggtgtaatccggatgggcgatgtgaacggagacggacagatcgacggcgaggatatggaggaactgatcgatgccattgacgaggcagagagtaactccacggattcccggtgcgattttaacggggacggggaagttgatctcgttgatctccagtactttacgattttttataaaaataagagtaatacaaaagcgactgtaacaagccaggccctggtggatccgaaagctgttactgcatcctccagcaacgcagtattttccgtggatacgcttaaggaagtgtttgctggaaacagcagcgaggcgctgaagctggagacagcggaagagacggcaattactccggaaacgccagttgaggtcagcgcggagatagagcaaggcttaacggcagcaggctttacaatccagccggtcatcggttccggcaacacaatcagggacggctttgtgaccgttgaatgtgagggtgaagacgatcccgtcgtctttaaaatagagaacggagtggcggtcagacagacgggcgcaaaggcgcgtgcggcattcagaagcgcgtcacccagaagcggggcagaggactcagccgccggaaggaccattgtcatcgatttgggaagacaggtggcgatcaaaaaggtgacgatcacggtgactgctgcattggaaaaggaagccacgctggttgaaatatccaaagtggaattcttaaacaatatggaaaacagaattccggagccggagatgaacattccggagaacttgaatgcggtggccggcagagagtcctttgacttaacctggaagcgcgcggtcaatgtaaccgggtacgaggcagaggtgaccggcagggtgaaaagcggaatcaaaaccgctgtcatcccggtatcggagaaccgtttaagcgtcgagtcaattcaaaatgaggacctgatcaacggggaagattacaccgtgcgtgtgcagtctgtgaacggagcctggaaaagcggttacagtgagtcggtaaaggttacgccggaggcgtccaaacggccggatccgccggagggaatcacggtgaagggcggttaccgcagcctcgatgtatcctggaaaaagatgaaggatacggacagctactccctgttttaccgggaatacgacgatgcagacggaagctatatccgaatcgacaacattgaaaataccactcagacgattccgaacttaaaggacgaaacaaagtacgatatttatctgacaggtacaaataaaataggggaaagcgcgccctccatgcattacagcggaacgaccgagagcgtcaatgccccggtaacgccaaactacaagctgatcaatgtggccggagagaacggcggaaccgaacacatcaaggcggtaaacaaccatgggggaactgcagacagcgagtttgcagttgcagacaacgacgcagtatccgcgtgggtgcgcaacgactgggatgcaggctgcgtctatcccggtgaatcaaaatcaccgaccgtgaccctcgacgacagttacacgatggataccgtggttattatcccggatcaggctcagaagtttgcttacaccgatgcaactttcttctattggcctgagggaaaaaacagtcaggtgcaggcggccggtacattcagcagaaaaaccagctctaacgggaaaacatattatgagttccagaccagtcagccggttacgacagaccgggtccaggtcagactgactaccggttatggcccgtccagcaggatcagtattgcggagatgaaattctattactatgatccgatcgagcatgaggtgtacgatctgtttgcagatgatatgcacctgtccttaaaggaaggggtaacgcaggagagtattgacggtctgagggcgcgtctggaggtaaaagacgaggtgagcggggaactccatccgaagaaggagattctggagagagagcttactacggcggagcagatattaaaggatgaggccctggccgatattctgaccatagacaaccgggtgacgaagaaggcagacggcagcattacctttggcggcggattaaatgcctggcagccgctgggcgtcacggccatggccggagatacggtgatggtctatgtgggaagcccggagaagaagacgggagacagcacgaatctgcgcctgatcgcgacccagtaccatggagagtcgagtgcatggtcaaaaacaatcggcatgctgaaagcaggaatcaatgaaatcaccattccgaagatcacggatctcgacgtggaacagggcggacagctttacgtcgaatacaccggagcacagggcaaagaacgctacagcgtgagagtcagcggcggacatcagataccgacgcttaatgtgacgatggcatctgattccaatgcagcgagagccctggtgacgaaatatgtggaagaactggaagccactgcggccaatctggagacagagcatgaaaatcacaaaaaagcgcatgacggagactggagctctgcaaagaagaactgtattctgggcgctacggatattgtaacaaaatatatgatgttttccgtttcctcccagcagattctcgccggattatcaggcggaactgtggaggaaaaggcggagcagctgtatcagtccctgacggcggctgatgagatggtgaatcttttctatcagcataagggactgagcagtgatcccgatgcgggtgagaagaacaaattgccggtgagccggctgaatctgcgctatcagagaatgtttgcaggcgcgttcatgtatgcgggaggacttcatatcggaatcgaatgggggtccataccggggcttaccaggggcgttccggtgaaggcggatccgaaaggcagatatgaaagcggtcaatacttcggctggggaattgcccacgagatcggccatgaaatcaatgaaggggcttatgccatagccgagattacaaataactatttctccgtgctggcgcaggctcatgacaccaatgacagtgtgcggttccagtatccggaggtttataagaaggtgacttcgggcgtcacagggcgctcctccaatgtgtttacacagctgggattatactggcagcttcatctggcatacgatatgggaggttacaactataaaacgtacgataagtaccgggatcagtttaacaacctgttttttgccagagtggactcctacgtaagaaatacagaagcggcgccgaagccgggcggagtatcgctgagcctgagcggagacgtggacaacaagcttatgcgtctggcgtgtgcggcggcggaaaagaatattctggagttcttcgaacgctggggtatggtgcctgacgagacgacaaagaagtatgcgcagcagtttgaaaaagagacaagagcgatctggtttgtaaacgatgaggcgagggcatacgtgctgaagaacggaaaagatggttccgttgcagccggcactgtggtcgaggctgatttaagctacacagagaattccaatgaggtgacgatccatctcgcaagccagtctaaaaagccggaggcgatgctgggatacgaaatctaccgttccgaaaccatcaagagccatgtggagaagaaaccggtaggcttcgtgactgcggaccagacggaatttgtggattctgtttctactgttaacaacagggtcttcacctatgaagtagtaggttacgataagtacttaaatgccacaaaaccggtggtactggagccggttaaagtatcccacggcggcgtgattgataaatcagactggaccgtaaccacgaacatggtctctgcagaggacaaggtggatgaggagatcaacccggatacggtaaccatggaggcgatcggaaaggtcatcgataacgatgcgggaaccacctatacaggaaaaactgtggcaggcagtaacggaaaagcaccggcggcatctgttaccattcacttaaacagggaagagaccatcaccggtcttacatataaactgagtaatgcggataacgcggcaggaagcccgatcggcaattttaaagtggagatcagcgataccggcgcagatggttcctggacccaggttaaggccggaaccttctccgtagcgcaggggcagctggtgaacggcagtgagaccgtctattttaacaagaatgatgacacatggctgtacgcctatgacacctcatacataaggattacggcggtggatcagaagggaaccgatatatccatttcggagattgatctgctgggacagaccggagacgacattgactttggtcagacggattcgatcggtattctgaaagaggactaccatgcaggacatggagagagcggagaagccgttattccgaagggttcccttatatttacaggtacgtacaaaggaaacccggcgtacaatgtggtcctgctgtatgatgagcagggaaagattgtaggcggtaccgatgaagcaggaaatatatcggcggcacagatgatctttgcggaagtgccggagcatggagaactgggtgagaccagcagcggaacctggatctattatatcgaacccgggaactttaaaaaagacgctcttccaaaacgtgtgagagcggagctctaccgggtagacaacgcacatgacaacaggggagaacgccttgtcagcaatactctgtttgtcgacatgccggagaaactgccggtgatcgagataaaagcacaggactgaacgtacgggaggagaaaatatgttgcagcgacttatgaataggaaagtagtaattggcctgctgggaatcctgatccttcttgcagcgtttggccgaatcatgactacgccggcggaggaataccggtttgtcacatgggaaaagggaaccagcgaaaatgaggtaaaagtaagtgttatgctttctgcacgggaggatgtgcagaaagcaggaaccttccaggttcagttcggagtggcctccgatgatccggatgggatagaggatatcaaatttaagttcgacagcgatttaaaaaacaattcggacgtaacggttaaaacgtatcgctataatcagagcaacgggaccctgacgatctacgtatcaggtgcagcagatgatatactgaaaaaggggacagcgttaaaccttggaaccattgtggtcaatgcggacagtgatgtgacgttctcggttgagccaggcggctgtaaaacggcggatgagaactatacagaaagaacgctcaccgtgtttggaagccaggatgattatacggttaagcgggagacgtcagacgacgatacgccgaatgagacaccggaagaaacaactccggatgagacgccggaagaaacaccaggtgaaacggggcctgctgagacaccggaagagacgctgcctgatgaaacaccgggcggaacgcttccggaagaaacaacggacagcagcgaaccggaagaaacgccggagcaggaagattcctcagacagtgtgtggaaggatccggaagagacgagcggaacctggaaggcaaaggacggagtctggagctttgaaaaggaagacgggacctatgcgcagagcgagtggatcaaagtcggcggagagtggtactggatcggtgctgacggccggatgattaccggctggattcatttaaacaatgtatggtatttctgcagtccgtccggggcgatgaagaccggctgggtcaataccggggaccactggttctatttcagcccatccggagccatgaaaaccggctgggttttagaaaagggctgctggtattatatgagtgaatccggagccatgaagaccggctgggtacagacggacggaaagtggtattacttagatgaatccgggaaaatgctggccgataccgtgacgccggacggtgtcagagttgacaaaaatggtgtcagggtcaacggaataacagaataaaaagtgagggactgttttaggaatattcttaaaacggtccctctttatctgtgagatggcgtttgatctttcgtttgggccatggtaaaatagaaacgaaacatatgatcgaatgaaaaaggtggttgagacaggatggaacaattatcgctttttgacgaccgggctgccgtgggtccgctggcaagccggttgaggccaacggggctggaggaatttgtgggccagaagcaccttctgggtgagggaaaggtgctgcgccggattattgatcaggacatggtgtgttccatgatcttctggggacctcccggtgtgggaaagaccactctggccaggatcatcgccaaccggacaaaggcctccttcgtggatttttccgccgttacaagcggaattaaggaaattaaggaagtgatggctcaggcggagcgggaccgccatatgggcctgcgcacgcttgtatttgtggacgagatccaccgttttaataaggcccagcaggatgcatttcttccgtatgtcgaaaaggggagtattatcctcatcggagccacgacggagaatccctcgtttgagattaacgcggctcttctttcgagatgcaaggttttcgtgctccaggcgctccagacggatgacctggtaattcttctgcaccatgccttaacgagcccgctcgggctgggggatcagaggatcgggattacagaggacatgctccggatgatcgcccagtttgctaatggggacgcgagaacggcactcaatacgctggagatggcagtcctaaacggggagatcagcgcggaagagaccaccgtgactcccgaagtgctggaacagtgtaccagccgcaagtccctcctgtatgataaaaatggcgaggagcactacaatctgatttccgcccttcacaaatccatgagaaacagtgatccggacgcggcgctttactggctggcccgcatgctggaggccggagaagatccgctctatgtggcgagacggctgatccgttttgcaagcgaggatatcgggatggcggacagccaggcgcttacgctggcggtctccgcctatcaggcctgccattttaacgggatgcctgagtgcaacgtcaatctggcgcacacagtgatctatctatccatggcgccgaaatccaactccgcttacgcgggctacgaacactgcagggaggatgccctgcacacgctggcagagccggttcccttagtgatccgcaacgcgccgacgggactgatgaaggagctgcattacgggaaaggctatcagtacgcccaccagacagaggacaggattgccgccatgcagtgcatgccggactccttaaaagacaggacgtactatgtgcctacggaagaggggaatgagaaggcggcgaagaagaggctggaggaagtgaaggcgtggagagaggcgcatgggatgtaggggcaggcagtaaggaattattttctgcggattgaagctgcggttgtggtaagctggctgagtgaaattactgattatttagtgatttcactcagcttttttaattgattccctgtaaaaatgatgtctgagagctgccggtacaaaatatttaaaaaaattcgtttcattatagataccacaaacgactaactaataagtaggtgagtgtttaaaacgtctgattatatgaaaaaaaggcgttacaaacgctcgaaaatacttttatcgtgaattatgattattatcaggaggtattataatgaatgagcaatttatacgtagtcggctttccagattacgagaagaaaaacaggtctcagagcgaaagatgagcctggatttaggacacagcaccagctatattcgtagtatcacctctggcaggacgcttccgtcaatgagtgagttcctttatatatgtgagtatcttggaattacgccaatggaattttttaatgatagagagtcatggcgaggaagctgatattgaagacttttcagatggccagacatgcctgtcacagcttagaaacagaaatttcaacatcctctttctggatatagagatgccgggaatggacggtttttccatggccgggaaaatgcaaaagagttatccaaatatagtattgattttcgtctcttctcatgaaagcctggtttttcagtcatatgaatacgatacattctggtttatgcgtaagagcgcgctgatagccgatttgaaaaaagcaattgataagtattttgcgcgcattatttataatgaattattttatgtggtaaatgcacaaaaagtttattataaagacattctgtatatcgaatgcattggacatttgattacaattaaaacaacagacaaaacttatagcatgtgcggcagcctaaaaaaattggaggaagaattaacgccctatcaatttatccgtgtacataagagttttttggtaaatatgcagcagatcaatgtgattcataatgataaaataatccttaccgataacagcagtgtattacttagcaaagctcggcaacaaacggctccggaaaaaccgtggagtacgtctatgatgaggcggacaatctgcagaagatcatctatccggataatggtacggtagagtatatttacgataaaaacgacaacatcacgaagatcgtggaccgtgacggaagagaaaccttctacagctatgacccattgaaccggctgacaaaggtgaaacgcgcagacggaagcactagcagctatacttataatgcacgcgaccagatcgtggaggcggagaatctctgctcctgcggctttctgatctcggactatcagtacacgtatgacgatgccggactgatcgtgagtgagacagccaaagagtgcctgtttgtgtcgaataaggattacggccacaaaggcggaccggacggagaatgcgtccacgtatcagataacccgtggcagaaccagaatccggtatgggagatcacaaagagaaccttcaagtatgacaataacggggaactcatagagtgtaaagaagataaaggcatgttcgataagacggtatatacatacgaatatgactccgtaggaaaccgcacccgggtaaagaagcaggaggtattcgaataccggacagatcagaccacctatacgtacaatgcggataatcagatggttggagcagtagtctgtgaaggaaatctgacgaagcggtataccttcaagtacgatgccaacggcaacctgacgcaggagtgcctgatgaaccgcgccgaagtaacgtatcagtacgatacagagaaccgtctgaaggcagtgaaggaccagcagaagctgctgatggcggcagcctatgacggagacggaaaccggacattccagttgaactacaatccggatgcggaatgcggttatgggaagaatgtgagcggagaagtcttcatgccggagaataataagaatgaggatggaagcttaacggcggaaggcgatttattcagctatatctgctctgcaacgggacgggcttatgatctgacggagtatgtgaatgatacgaaccggcagtataccgaggtcctgactgcgtatacggtgaacagcggggcaacggaaagctacagctacaatggaaggcagagactgtcaaggaatgatatatggacggaggcccgcgacctggtatgtaacgaaacaagctattacctgtatgacggccgtggaagtgtaacggcgaatacgtggcagaacggaatggtgacgagtgtgtaccagtatgacccatacgggcaggtgacactgggaagtacggagcatacggatttctacgggtataatgcggagagctacaacccgaataccgggcttgaattcttaagagcgaggtattataatgcagagatagggagattcttccaggaagatacgtatttgggagatatcaacgacccattgacactgaaccggtatgcatatacgaagaatagtccgttgaattatattgatccaagcggccatactcaagtaggtattcccaaaggaataataagcaggacttttgataaattagtcgataatattaaaggaaaacttttcatttaatatttgggaaggagggtgagttagttctactggaatctagcaaaaatgacgctcatatcaaagctgcaataaaaagagcggaagacagtaatgatattacctattgccaggaaatagatgaagaatattatttaagtatgattatgggtattgatatggaattggcttaccagtatggctttggagatacaagaacaaaagcaatgctggatcaatttcaaaagctgactggttctgaagatttactggtggatagtttactggatagggaatcttactattatggtaaatatataggtgatatgattgcaatgattgcaaacagtggaatgacagcagctgggattgcagcatttatagaactgttgccggcggcagcacctataatgagtgcgtcatttagcggagatattggtgtaatacagatggtattaagtgggggaatgatatttgaaatagaagtggcaggagcagcaggagctggattgggagcagggctatataatatagcagcgattaagcagagagcgtatgataatttagataaggcacagaattctggaaagggggattctaagactgagttaacttctagtattgataaagacccgcgccttgtaaaagctgcagaagaaatgggaaaaaatgagcgtgtacaacaagaagcggatcaccttattgatgaattgttaaaaggaaatgaaaaccctggattaggtagcaagaatttatttaaggatgtatcttatctgagaggaaggaatggtgcaagagtattttaccgaaaaacagctaatggttatgaaattttgggaaaagcagataaagcgaatgaacaaactgttataaacattttaaaaaaattatacgagtaggtgtgattatgaaaatcaaaaatattacttatccaacggttttagaaaaaattcctgatttatttaatgataatattgatgtttttgtagaaacagaagatggaatgcattttacgatgacaatatgcacgccgatgttttatttacattatatggagaaggaaaatttgaattttatccctgcctcgccgccagatattattgtaaaagagttaacacataacaatattaaagaagcgttagagtctttttgtgaagacgatggttattggatgaaactatattttctttcaggtgcaagcgaggggattttttctaaagataagttggacgaaatgattcaaaatattgaaaaatgatagaatctcattgcccggctatgccgggcgatgtcatccgaggttatgcagttctttggcataacctctttaaccagcacacttttcgaccctgagtattttggctctttggagggaaatgtcgttgttccaaattggcccaacgtgccggaattcctgtgttatggtacatctttccgaggcggggcttaaaaatggcacacaggctgtcacggtgcgtcacaggggtaagagaatgtctgagagaaacgaagcatgatggaaggaataaaatttgctccatttttcaaaaaaaggtcggattgccttaattgcaccgtcctgaatcatgctttttccctctaaaaagcccacagatgccgtaaaatcgtgcatttccgggatatctgcgcagttcgctggcataactttctcagaaatcccagaaaaagttattcaaaaaacagaggcctccagcataaaaatttttggtctttgttacccgtaaataaccagatttcgaatgaagaaaaaatgggctgggtgccagattccttaaaactcaaaaagctgggtgccgttaagccacccacgcacgaagattttggtaagaaaaacgcaagggaattgaaattgacattccatccagtcccatgttacaatggcgcacacccgggggtttaagggggaagaaaaacacagatataactgtaaggaaagacagctgccggttcacaaagaatcggtggctgtttcttttctggtgatgttctgttcctgctggcagacccgctggacaggccgccgcgcagatttcagttatggatatccgctaggagaactgataccactatgtcacaaagcagaggttcggttttgcatcaaatctcacaaatcggagaaattgatcggaaagcatttgcaatccatctcattcagagctaacatacaccacacctcgaaagaggaaataacctgtaaagttcaaggttgtggaagtggacaggccaaatcccccttgcgatggccgtagccagaaggcgtaaaccggcgcataacgcttatcagctgaggttgccggcagttttgcgatcatggacggagacaggaaaaagaggaaggatgacatctgagaaaagaaaacatcatctatgtggggattgacctgcataaggaaacacacacggcagtcatgctggactgctggaaccagaagcttggagaaatcacgtttgagaacaagccatcggaattcagtaagctgacgaggaaagtcagccggtttgtgacggaagaaaaggaacctgtctacggtttggagaatgcttacggttatggccgcgcgcttgctgtatggctgattgaaaaaggggttgcggtgaaagacgtgaatacggccttatcttatgcccagaggaaaagcgtgccgatgtaccagaaaagcgacagctatgatgcggaagctgtggcattggtgctgatcaatatgctggataaactgccggatgccataccagatgataagtattggacgctgagccagttggtgaaccgcagggacaatatctgtacccacctgcactgcctaaaaaaccagcttcatgagcagctctgcatagcgtaccccagctataagcaattctttagcgatatcagccgagcaacggcactatatttttttatggaatatccatcgccagagcatttgcaaggaaagacagcagaagaactggcggaggaactgcgcccggtgagccacaataactgttcggtgaaacgagcggagaagatactgtccctggtgcgggtggatggagataccaaaagagaccatcaggagagccgggataccattacccgtagcctggtcagcgatctggagcattaccgtgtccaactggaagaagtaaaccaggcgatagaaatgctcatgccagaatttgactgcaccttgatgaccatgccgggaatcgaattgataacagcagcaaacatgctgtcagagattggaaatatcagccgttttccaaactccgccaaactggcgaaattcgccgggatagcgccagtgaacttttcatcggcaggaaaagggaaagatgtgtgcccgaagcagggaaacaggcggttacaggccatcttttactttctggcaatccagatgatacaggtatccataaacggaacaccgagaaatccggtcttccgggagtattttctgcgaaaattggaagacgggaagaataaacagcaggcactgatctgtattgcgagacgtttagtgaatatcgtgtatgggatgctgaaaaaccatatggaataccgggagccggggcaataagggctgtcagatatgaacagtttgtgctaagatagaactagaagaaacacagtgattggtttgccgccttttctaaaggattagagaaaaaggcgtaaaagatatgaggcggatgtgtcaatgccaagggggattctgattcttgggaaagaaatttaaaggatacgagcgaactaaatacttctgattttgacaatttaacagacaaaggaactgttaaagtcaatcaagctggttcagatagacctcctacaaatgatccgaacagctttctcagaacggagaatggagagcatgtatttgtatatgatgataatggggatttgatttatgatataagctcaagtagagtaaaaggatttaaaattaatactaaccctgcaggtaaaaagtttttaagtccttataaattagataacccggtaccacagtttattttagatctttttggatggtgataaaatgtatgaaataagatattgcaatagcattgtaaaacaaggaataatgaaaaagtttagaaagcctaaaggattaaatttatttgaacatgcatgtaattgtaattcattagaagatattattgcgatttcatatttgttttgccctgattttattcagataggagaatatatttttgtttctgtttttttcgaagaagaaggtgaggaggctataaaaaaagtagagaaattagaagaacgatttggtaagaataaaaaacttatagagcaatgggttaatagctggagtatcggagatttattcataaattgtacagacgaatcttatcaaaataattcgttgataatgcagttttgtgacatcttagtttataattggcaacaaagattgaaagaattgtttccgcacaaaaaaattatagtagaaactgggaacgaaataatgggagagctggggttgactattacggtttatgagcagtagttaatgtaataataattttaactatgattgttcgcccggctttgccgggcgatgtccccagaggttatgcgctttccagcataacctctttaacctgcacacttttcgaccctgctattttagtaaatttcaactggaaaacccgttcccgaatcggcccaacaaggcgtaatatctgtttgatggtacattttacttataaacgaaacagcatgacaaaaacggccataaaataatttttatcggccgtttctgtcatagtgccatatacagatgcaggctgaagttctactccccatccctagcgtcattcccatctttcccctgatcaaccatcggcccttccgtgccttcctgtgccgttgccattttcgtttgggcgccattcgactgctctaattcctcccgggatttccggagttgttctccctgacggagcgccagctccgatgctttgtcatgcagctgtccggcttcctgatcggaacgtccgatggagtccatctcattttctatgagggcgcctaccgtgtcgccgccgagtcccttgctcactaaggtgtcgacgtgagccgctccaagatcaatttccgattctttgattctggcttcactctctatgtggctctggactgcggaaatcttttccgcatggcggagatcctgggagacagcggccagagtcgtaaggtgttcagttgtcagctgatcgtcggttttgttcttgcctgttttgtcagaactttttttatcttccggctctatgcactgcctggcctgctgggtgtaggcgttagaaatctgtttatcaatggcatcgatctgcttcttgtacgatttgagctgatccttgatgtcctccagctttccgccgtcgcctaatgtcgtttccaccagactgtttctttgatccacaagcgcctgtttttgcttggtcagattctcaatcatgtttattaatttaccctgaggggagagggtgaaacggtcgtttttcggacggtttcccagtatgcccccgctctttttatcctgcactgactggtatttggcgaatgatgcatttacccgtgcggtattgataagcgtattcttatgcaggctgaaattcagatttactctcattccatttcctccgatctttgatgtccgttactatccttatcgtacaggcgggtgaaaatgtttagctttttcaaaaaaaactttctgtattcgttttctgctgtgaactgcagccggtgtgttttcggatttcaggagatccggaaaaattgttgatttttcaacctgattgtaatataattagcttttagcctggaagtattttgaaattagtaaaacgggaatgcataggaaaaagagaaacaggaagaatattcaaaaaggagaacaggaaccgatgaaaaagattcttgatttaatcacatcagaggtaaaagaggcattcgcagcctgtggttacgatgagagctttgcgaaggttacgctgtccaaccggccggacctctgtgagtaccagtgtaatggtgccatggcagccgcaaaggcatacaaaaagaaaccgatcgacattgcaaatgaagttgtggagaagctgtctggcggcgatatattttcagaagtgaacgcggtgatgccgggtttcattaatataaaactggaggccggatatctggcgacctacatgaacaacatgagagaagaagaccagtgcggctgtgaaaaggcgaaaacgccgctcacgatcatcgtagattacggcggagccaacgtggcaaagccgctgcatgtgggacatctccgttccgccatcattggcgagagtatcaagcggatgggacgtttcctggggcataaggtgatcggtgacgttcatctgggagactggggacttcagatgggactgatcattgaggagcttcgtgacagaaagccggaactggcctattttgatgagacctataccggagaatatccgaaggaggctccgtttaccatcggtgaactggaggagatctacccggcagccagcgcgaagtctaagacggacgaggaattcagcgcaagagcccacgaggcgacgctgaagctgcagaacggatacgcaccgtaccgcgcgatctggaatcatatcatcgatgtttccgtaacagatttaaagaagaattacggcaacttgaatgtatcctttgatttatggaaaggagagagtgatgctcaggcctatattccggggctgattcaggaactggaagagaaaaaactcgcttatgagagccagggcgcactggtggtcgatatcgccgagcccggtgattccaaggaactcccgccctgtatcatccgcaaatccgacggtgcggcactctactccacctctgatttgggaacgattctcgagcgtgagaaggaattctgcccggactggtatatttatattacagataagcgtcaggaactccattttacacaggtgttccgtgtggccaagaaggccggtttcgtgccggaagaacggaagatgtcccatttgggctttggcaccatgaatggaaaggacggaaagccgtttaagacgagggacggcggcgttatgcgtctggagaccctgatttccgatattgacgctgcggcatacgagaagattatggaaaaccgcaccgtgtcggaggaagaggcgttaaagacctcgaagatcgtcggcatggccgcgctcaagtacggggatttatctaatcaggcttccaaggactacatttttgacatggatcgtttcgtttcctttgaaggaaacacaggtccttatattctgtatacgattgtgcgtatcaagtccatcctggcaaaggcttccgatctggaagtgcagggtgtgtgcacgggagacattcttccggccgtttccggagcggagaaagacctgatgctgcagctttcaaaatataatgaggtgatcgagaccagttttatggaactggctccccataagatctgccagtacgtgtatgaactggctaacgcgttcaacaggttctatcatgacacgaagatcattgccgaggaaaacgaaaaacagcgtgcttcctggctcagtctgatcagtctggcgaaggatgtccttaccgcctgtatcgatctgcttggaattgaggctccggaacgtatgtaatgtgtgaacggatgtgaaaaacttatgaaagtatcacagatgacaacaagcgccttctggaaaggcgaatcgggcgtaaaaggcctggttgaagaccagggaaaacagtataaagctaatttatatatcaagggtagtcaggtttatgactactcttgttcctgtgtgcagggaaattcctataagggaatgtgccctcactgtcaggaactctacagggaataccgggagaaagcggctgaaaattcggggcgtcccgtcaccacctcccagcaggccaggacgatgatccgggagtataccaaccgggaagtggcccagatcatgatcgaaggggaagaaaagcaggttcagctggctgtccgcatcatcgcggaccggagtgatgtgaagctggaattccgtctgggacgggagcgcttctatgtgcttaaggaccttgtggcctttaccagggcgatagagagtggctcctttgtggaatatggaaagaatttggcatttcatcacaatctctccgtatttacaaaggagagcaggccgctggtggaatttatcatggagctggtgggcagctactgtgagcactacgaacagtttcagaagagctcgttttctgccatgccggctctgagaagcttaaatctaagccggagcaaccgggaccgctttttcaggctgatgatgggggaaacactggaactggaggattaccgcgctcacaagcgaatggtgacgctgacggaccataatcctgatctggcggtcaaaatcagaaagaagggacgggatggcattctggtatccattgataaggggcttctcatctttgagggagaacgccatctttatgtggtggacaaggaacggatctatcgctgcgacgaagcctgcagttcgacgctgcacgtctttctggaacagatgattaagagcttcggctcaaactgtgaggctgaggtaaacgataaggacatgccgctgttctatgagcgtgttctgaaaaagatagcatcctacagtatcatcgacgcgggcgacgtggaactggaagcctataagccggaggaactgaaggcgagattcgagtttgacagccagggacccaacgacctggtcttaaagccgattctgtcttacggggattactcctttcagccggtggaggatgagaagcttccaagaaccgtgtgcagggatgtgccgggagaattccgggtcagtcagctgattacaaagtattttaaatataaggaacacgataccgagtatccggcgatccgtgacgatgaggaggctgtctaccgtctcctcacggaaggcatgagcgagttcatggcccagggagaggtatatttatcagaagccttcaaaaaactgaaggttcttccgccgccgaagatttccatcggcgtcaagagcagcggaagctggctggagcttacggtggatacggaaggaatgtcgggagccgaacttacgaagctgctgtcagaatacagtcagaaaaagcggttttaccggatgaagaacggcgagtttctggcgttagatgacaacggtctgatgacggtggcgaagctggtggaaggtcttgcggtgaacaaaacggatttgcagagccagaaattccggcttcccaggtaccgggcactctatctggacggaattctaaaggagggctctggtatcactctctatcgtgacgcgctgtttaaggctgtggtccgcggcatgaaatctgtggaagacagcgattatgagattcctctgacacttcgttccgtgctgagagaataccagaaaacgggattccggtggcttaagaccctggattcctacggatttggagggattctggcagacgatatgggacttggtaagacgattcaggttatcgcactgctgctggacgagagtaaccgcgagccggattcttcggcgctgattgtctgtccggcatcccttgtgtataactgggaaaatgaaatccatcactttgcgccaaccctgaaagtccgcacaataagcggtaccgcacaggagcgggaggagcttttgaaggcggcttcggccggagagatcttaattacgtcctacgatctgctgaagagggatattgccttttacgaggagagggaattccgttttcagatcgtcgacgaggcgcagtatatcaagaacgcctcgacccagagtgcgaaggcggttaagtcagtgaacgcccgaacaagatttgcactgacgggaactccgatagaaaacaggctcagcgagctgtggagtattttcgatttcctcatgcccggctttctgttttcgtaccagaggttcaagaaggagtatgagcttcccatcgtgcgggatcaggatgagaactgcttaaaggggctgcaccgcatgatcggtccgtttattctgcgccggctcaaaaaggatgtgctgaaggaactgcccgataagctggaaaatgtgatctattcaggctttgagaaggaacagaaggagctgtataccgccaatgcgtggcaggtgaagcagcagctggagctggcgggagacggcggctctgacagaatacagattctggctcagctgacgaggctgcgccagatctgctgtgatccgcatctctgttacagcaactataacggcagttctgccaagcttgagacgtgtatcgatctgatccgcaacggcgtggagggcggccataagatcctgctcttttcccagtttacgtcgatgctggaaatcattgaaaaacggctgaagaaagaggggctggcgtattatattctgacgggtgcgacgcccaaggaagagcggctccatatggtaagctcctttaaggatgacggagtgccggtattcctgatttccctgaaagccgggggaacgggcttaaatctgacggctgcggatgtggtgattcattacgatccgtggtggaatgtggcggcgcagaatcaggccacggaccggacgcaccgcatcggccaggagaaacaggttactgtgtttaaactgatcacaaaggggactatcgaagaaaatattttaaaacttcaggaatcaaagaagaatctggcggagcagatcatcaccgagggaaccgtctcgttcggcagcctgacgaaggaagacttaatcggcctgctggattagagcgtgacgggacagctggttcatgtgaagaaaagaaaggatggttaagagatgaaagtactgcttttaaacggaagccctcatgagaagggctgtacatacagggcgctcacggaagtggcgggagccctgacgaatgagggaattgagacggagatcgtccatatcggcaatcaggccattcatggctgtatcggatgcggcaaatgtgccgccgccggacgctgtgtctttaaaggagatccggtcaatgcatttttggataaaatggagcatgcagacggtctggtcgtcggctctccggtctactatgcatcggcaaacggctcgctgtattccttcctggaccgtctgttttacgccggaagctgttttgcctttaagccggccgcagcagtggcatcggcccggcgtgcggggacgacggcgactctcgattccctgaacaaatactttacaatttcccagatgccggtcgtatcatcccagtactggaacatggttcacggcaactcgccggaggaagtggagcaggatttggaagggctgcaggtcatgcgcacggtcgggaagaatatggcgtggctgcttcactgcattgaggccggtaaggcggcgggaattacaacgccggaaccggagcagagactcaggactaattttatacgctgaatttgggaggacgccgaagaagcggcgggcggcggcaggacgggtccgggggcatggatattccgtgtccgtcttgcttcctactcgccataagaaagtccgttcctgtcgaacacgccaaccgcgggcgtgatcgccaggaacggactttcttatgactcgtatccagatgccggcacactggaatatccatgcccccggacccgtcctgccgccgcccgccgcttcttcggctgtgtattggctatgctggtaaaaagatgggggacaggattgagggctgaactgttagggagagagaagaaaaagagaaaaaggcctttacttttgccatatctgttgtataatggaaaagcactatatatggtgaagaaataattacatacgcaaaatgtagaagatttcacggcaaattgacggctgctgtgttattttttagcagtatgattaaagtagaatatggattaaaggaaataaggagacagcgatgattaaggtacagaaacgtgacggcagaattgtgaattatgacagagagaagattgtgagggcgattcagaaggcgaatgcagaagtggatgcggcggaacgcgccggggaggcattgattgacggaattctggatgatgtggagagagaatgcgaggatgttgtccatgtagagagcattcaggatatgatcgagagccgcctggttaagcagaacaagtatactctctcgaaaaaatatatgatttaccggtatcagagagcgcttttaagaaaagcgaacacgacggatgaatcgattctgaagctgatccggaatgagaataaagagctggctgaggaaaattccaataagaatacgattctggcatctacacagagggattatattgccggagaggtgtccagggatttgacgaagcgtatgcttctgccggaacgcatttccatggcccatgaacagggcgcgattcattttcatgacgcggattactttgttcagccgattttcaactgctgtctcatcaatatcgcggacatgctggataacgggaccgtgatgaacgagaagatgattgagagcccaaagagctttcaggtggcctgtacggttatgacccagatcatcgcggcggtggccagcaatcagtatggcggccagtctgtggatatgagacatcttggaaagtatttaaggaagagcagcaataagttccacaaacagatccgggaagagtttggcgacagcctggatgaggagtccgtggagaagatggctcggattcgtctgagagatgaactgaagtcaggcgttcagacgatccagtaccagatcaacacattgatgacaaccaatggccaggcgccgtttgtgacgctgttccttcgcctggacgacgaggatgagtacatcaatgaaaatgcgctgatcgtggaagagattctgcgtcagagactggaaggaatcaagaatgaagcgggcgtctatgtgactccggcatttccgaagctcatctatgtactggacgagaataactgtttaaagggcggtaaatacgattacatcacaagacttgcggtgcggtgctcttcgaagcgcatgtatcccgattatatctccgcgaagaagatgaaggagaattatgagggcaatgtattcagctgtatgggctgccgcagcttcctgtctccgtggaaggacgagaatggggactataagtttgagggacggttcaatcagggcgtggtgagcctgaaccttccgcagattggaattctggcaaagggcgacgaggaagtattctggaagcttttggacgagcgtctcaccatctgttttgaggcgcttatgtgcaggcataaggcgctggaaggcaccttatctgatgtgagtccgattcactggcagtacggagccattgccagactcccgaagggggcgaagattgatccgctgcttcatgacggatactccacgatctccctgggatatatcggcatctatgagatgacgaagctgatgaaaggggtcagccacacggatccggcgggagaggaatttgccctccgcgtgatgaatcgcatgaaagaggcagtcgagtgctggaaagaagagaccgggctcggtttcggcctttacgggactccggctgagtctctctgctaccggtttgccaggattgaccgggagcgcttcggcctgattgaagatgtaacggacaaggggtactacacgaattcctatcacgtggatgtgagggagaagatcgacgcattcagcaagtttacctttgagagccagttccagaagatttcttccggcggcgccatctcttatgtggaagtgccgaacatggcgaagaatttagaggccatggaagaagtggttaaattcatctatgacaatatccagtacgcggagttcaatacgaaatctgactactgccaggaatgcggcttcgacggtgagatcatcatcaatgatgacatggagtgggaatgcccgcagtgtcataataaggataaggacaagatgaacgtaaccagaagaacctgcggttatctgggtgagaatttctggaacgccggaaagacgaaggaaatcaaggcgagagtgcttcatctgtagtctgaggagcgataatatcatgaaatacgccgatatcaaacattgcgacgttgccaacggcaccggagtgaggacgagcctttttgtgtccggctgcactcaccggtgccggggctgttttaatgagatcgcatgggattttaattatggaaaggaattcacggacgaggcagtacaggagatcctcgattcctgtggaaaaagctatatatccggcctgtctctgctgggcggagagccgatggagccgcagaaccagcgggcgcttctgcctctggtcctccggtttaaggagcagtatccggagaagacgatctggtgctacaccggttatacgtatgaggcggatctgctgtcgccggagggaagggcgcactgcgaggtgacgccagaaattcttgcatgcatcgatattctggtggatggggaatttgaccaggagtgttacgatctcaaactgaaattccggggcagcagcaaccagcgtgtgctgcagattcacgagccgggctgtccggagctgtttgcagtaaaggatgaaagtactcaataaggaaaagggggaatcggaccgatgaagcgggagatcagcctggaagagatatcagatgggaagctgtatggcagcggcgacatggtgaaggtgggctgtgatgactgccgcggctgttctgcctgctgccgcggcatgggaagttccattgttttggatccacacgatatcttttgtctggagacgggcctgggcctgtcctttgaagagctgctggcggaggcggtggaactgaatctggtggatggcatgattctgccgaacctgaagatgtccggcgagggagaagtctgcacctttttaaatgaggaggggcgctgccggattcatccctgcagaccggggatctgtcggatgtttccgcttggccggatctatgaggaccatggcttccggtattttaaccagatacacgaatgccggaaggcacagaagacgaaggtcaagatccgtaagtggatggataccccggatctgggccgttatgagaactttattgtggagtggcattacttcctgaaggaactggaggaaaggatggagaagaaacgggagcaaaaaccggaagagggatcagaacaggccggtggggaagatgcgaggaagcgggctgccatgggagtgcttaaggttttctatctgattccatatcagaaagagttggatttctatcagcagtttgaggcgcgcatggcggctgcgcgggaggaatttattaattttctgtaaaaatacttaaggttcccaaatccctgtttgcctgccggcggtctctgtgatatactaaaagcaatggaagcaaggcataaacaggtgtaaagtatcaggacggttgttcgaaggggaggaatacctttatggcgaaggtaaagaggtttagcacaaaaattaacagtttctttgtagagtggagtgcgctgaatcattatttgtcatcatatgagtgtgagaaaaacggcgttccctacatcggttttaaggatccgagggttcagaaactctggaacagcttgagttccgcggaaaagcgggatctgatgaagcattacgggaagaagaacgaggcggagctgggcgactatctgggataaggggaatgaatcatgattctttcgggaaaagaaatactaaagcatatggggaaagagattatcattactccgtttgatgaaaagagaattaatcctaacagttataatctgtctctggcggatgaacttctggtttacgagaaggaagcgctggatatgaaaaagcccaatccgactaagcggatcgtgattccggaggaagggcttcttctggaaccaaacaggctgtatctgggaaggactaacgagtttacgaagacggatcggtatgttcccatgctggagggccgttcttccacgggcaggctggggctttttatccatgtgaccgcgggctttggcgatatcggtttcgccgggtactggacattggagattttctgtgtacagccggtcagaatctatccgaatgtggagatatgccagatttattaccacgacattgacggggaatacgatctgtacagcagcggaaagtatcagaataatagcgggattcaggccagtctcatgtataaggactttgagtgagaatggtctgcggataagagaacggtataaaagatgatgtaagagatgatagaagagagccggatactaaaaagaggaagatgcagattcaggagtccctgaagcggtatcttcctcttttatggtcgcacccgctattccctgtgtcccgctgcgtattctccagggcagatgtccataacgacccggacaggctggattaaggcatcctcgtactgacatttccactggacctcccggctcaactggccgtctgcgatcccgtcgatggtctcgccggacttgaccggtgcatcggcatcatagagataagaggcaacattgtatgcatggtttacgacagcctgcggctccagtccccggaaatggtactggacgtcggggagtccgattgcatagagccccagggtgtccactaccttgtcgtcgctgccggagatgttgaaaaggcgggcgttgacgccaaagtatacaaaacggtcttcccgcggtatccggtgttccctgatctgatccgcggtaaacagctttccggccggtttgacccagaccgcagtgcagtcaggaaacagtctgaccgctgtctccatccagtccatcatcatctcacagcgttccttgtattccagcacggaggccatcatgtcaaacaggaaaatctcataccggcaccgctccaaaagggcgtctccgtcggccacatcccagagctggcttctggaaaaggcatcgatggagtcctgcctgaattcctgcacatcccccatgacgacctggggcggcagggcgccgtctttaaactgtgccagatatttttttacggcaaaagaggtcagagccggcgaaggggacacgatgtcgatcgccccgaaggtttcttccagagccgtgcgtatgatcccggcctccggtttgaccggtttttcttcaaacagaaggtagatctgatagaggttctgaaattctgctttttcctcaagattctgtttcagttcttctttcggtccttttttctttgaaaataatcccatatgcgttctcctttgtatctgtctgtaggaggcggattcctccgccgttacctccagtataccgtattttggaaaaaaggccattacaatttgcttaagatttcccccaggctttctgaaaaacggagaaatgaaatggggcggacagcgggatttcgtatcggcggcagatgcgcacaatctcataagcaccgatgatcagggcgaagacgccggtggcaatgttgctgacggccatgacgaccccgacgcttaagcttcccatggaggtataactctgcagaaaccagagtacggggacacggaaaacgaagacgcggcagaagttgatggccagtgtcagttttgtctttccgaagccgtacaacagggccatgacggacgcagtgatgcccagcggaatggctcccagcgcctcgaagcggtagatggagataatcatcttctgaaacgccggatcattgccggcaaagagacggctgagttcctccaggaaatacagcgaacaggccatgagcacgatcccgacagccaggttgaccgtgagaacacatccgaaggccttcagcgcgcggcggggctttccggctcccacactctgactgatgatggccgatccgccttcctggaagccgttttgcggcatggtggtgatgccgccgatgttgttggagattcccagcgctcccacggtcagcgcgctgtagaccgtactcatggaattgatgatgaccttgccaaaggaaaaggccatcttctctgcaatgaccggaatggagaggctgatcatgggaactgtggtgtcccgctgaaaggagaccgctctcatggaaaagccgaacacgttgtccttctgattcatgtttcggacagccgcggccagtaaaaacagctgggaaaggatcgtagccgtggaaatcatgctgatcccgcactgcaatccgtagacgaacagggcggtaaaggccatcttgacagcgataaccgccatattcaggcggagaatcctgccggaatttccacgggcccgttcaatggcaatataaatgttgttaaagaagctgatgaccataccgaagagctccagccggaagtacagagtgccttccgagatgaaggcctccggcgtcctggcaagccggagaaaccacggtgtgaagggaactaacaaagccagaatgacggcgcttaggaccgagcacatggcaaacagcgtgctgacccgtttcttcaccaggtcgaaatcacctgcaccgtaggcttcgcttattttcagactggacccgatggcgaggccgccacccagggctgacagcatcaggctgatttgtgataaataggccacggcggacacggagccggcgctgatatgagccgccatcatggagtcaaagattttaaagagctgatttaaactctgatacagggccagcggcgttccgacgtagagaataaccttccacatgttgtcgtggagggcaaactcccggaaatgctggtcttttgcggagagcaccgctttgggcaacaactgcctggacatgaatggttcctcctttgatgtaaatgccatagttttcgatgaatctgtatataagcatatagtcagagacgttggaaatctacgaatttcatgaccaatcatgaggatagtacagtttttttgacataaacggttgctttgtgctatagtataggccgaagggagggtgatggctggatgagacgacatggtcaaatgtcggaagcaatgccgaccggtatttttctgacgctgtccggtggatttcaggatgcttatacgtattatacccgcgggaaggtttttgccaacgcccagacggggaatatcattttactgggacataatgcgatgaatggagactttacggatgccttccggtatctggcgccggtgctggcttttgcgggaggaatctacatatcggaagttatacgcggtatctaccgggaatacgggaagctgcactggcgccagatcgtggtggcgctggaaattctgctcctgtttgtggtgggatttcttccgcagtccatgaacatggcagccaatattttagtctcctttgtctgtgccatgcaggtggaggcgttccgaaagatgaagggaagcgcttatgccagcacgatgtgcatcggcaatctgcgcagtgcgacggagatgctgtaccgttaccgccatacaaaggaaaagggctgcctggaaaaatgcctccggtattacggcgtgattctcgtctttggtatcggcgcagcgcttggaagcctcatgacttccctgtttaaggagcggacgatctggatatcctgcggttttctgtttgtctgtttctgtattatgtttatgaaggaagacatcgagggcgagggcgggctggattgacagcggagcgggtttgtgatacagttacattaagttaacaggatatttgagggagtaattccgcataagacaaaggcgagataaatcaacagcatggcagctctgcggcggcctggtttatctataaagaatgagactcatatacagtatacacgctgtatatgagtcttttccttttacagcgggcggaaaagattccctcttacagccggataaaaggcaggaggtgcggtgatgaagggatatttggatacttcagaggaagttctggaaaaactgaatacgaaacggacaggcctgagtgcagaggaagcggccggaagacttatggcagatggaaagaataaactgaaggaggcgaagccggttccgctctggaggcgctttttgagtcagctggccgatccgatgatcgtgattttgattgcggcagcggtggtctctggaatgacggcggtctatgcgggggagtcgtttgcggatgtgatcattatcatgattgtcgttcttatcaatgcggtgctgggggtggcgcaggagagcaaggctgagaaagccatagccgccctgcaggagatcgcggcggctacttccagggtgatgcgggacggtaagcagcagacgattcggagcgaggaccttgtgcgcggcgatatcatcgtcctggaggcgggagatgcggtgccggcagacggcaggattctggagtgcgccagcatgaaggtggaggaagccgccctgaccggagagtcagtgccggttctcaagacggaacgcgttctttccctggaggaggggacgaaggacatccccctgggcgacaggaagaacatggtttacatgggaagcacggtcgtatatggccgcggagctgcggtcgtgacaggcaccggcatggagacggagatgggaaagatcgcagatgccctgactcaggcaaaggatcatgagacgccgcttcagggaaagctttctcagctgagccggattctcagcgtgctggtgctcggaatctgcgttattatatttgcagtcagcttactgcgtgcgtatccggacatttccgggtacacggtcatagatacgtttatgattgccgtgagcctggcagtggcagccataccggaaggcctggcggccgttgtcaccatcgtgctctccatcggcgtcaccaacatgtccaggaaaaacgctattatccggaagctgacggccgttgagactcttgggtgcactcagattatctgttccgacaaaacgggaacgctgacgcagaaccggatgaccgtcgtggaacacaccggaaccgatgagatggcgctggcagcggccatggcactctgtaacgatgcacaattaaacgataagaatgaggcggagggagagcccaccgaggctgctcttgtggcctacgcatggtccgcaggacttgaccagaacagcctgaaacgggagtatgtacggattggtgaggcgccctttgattctatgcggaagatgatgtcgaccgtacatgaaaaggcggatggaaccgtgattcagttcacgaaaggagctccggatgaggtcctgaaacgctgtacccacatattatcggagggaagggccgttccgctgtgtgaggaggaccgggaaaaaattctcctcgccaataaatcgctggccggccgggctctccgtgtccttgcggcggcagcgagagagtacgcggcccgtccctccggctgggaggccgaagatctggagcagaagctttgtttcctcggtctcaccggaatgatcgacccggtgcgccccgaggtgctgcctgccatgaaagagtgccgcagagccggaatccgtcccattatgattaccggcgatcataaagacacggcggtggctatcgccatgcagcttggaattatcacctccccggagcaggccatcacaggcgctggtctggacgagatatccgatgaggacttaggcgatgagatcgggaagtattccgtttacgccagggttcagccggagcacaaggttagaatcgtaaacgggtggagagcgaaaggctgtattaccgccatgacgggagacggagccaacgacgcgccttccatcaagaatgccgatatcggtgtgggaatgggaattaccggtaccgatgtgacgaagaatgcagcggatatggtgctggcggacgataattttgccacgattgtctcggcggtgggggagggacggagaatctatgacaacattcgaaagtccatacagtttctcctgtcctccaacttatcagaggtgctgtccatcttttttgcgacgcttctcggctttgtcattctgaagccggtccatctcctctggatcaatctgattaccgactgctttccggcgctggcgctggggatggaggagccggaaaaggacgttatgaaccggccgccccgcagcccgaaggaagggattttcgcgggcggggtcggatttcatgtggcggttcaggggattgcggtgaccgtaatcaccctggcttcgtatctgatcggccattatctggaggcgggcgtgtgggagattacgaacagtgcggatggcatgaccatggcgtttctgaccctgtccatgacggagatcttccattccttcaatatgcggtctctgaatcagtcggtatttaccttaaaacaccataatccgtggctgtggctgtccatggcggcttcctttctgtgcacgaccgtggtcatctacgtcccgttcctgtccgatgcatttgaatttgaacatatttccctgaccgagtatgcggtggcaatcggactggccttctgcattgttccgtttgtggaagggatgaaatggcttcagcgaaggcggaaatgaggaacgttctctgcaaatgcctccgcttcgcactgcaggttttccagaaatcgattgatatgatatccgtcagtcgtcgcatgatggcaggtaattgagagcggcatcataattctgccgtctttttcatagaatctgcctgcctcaacggacggaagatagtacggtttgttctcataggagtgaaccgaaaaatgtttaaatgacacccagggaatacaggaaatggtataggcattcgcgggaggtgtctgcccggcctgagccagaacgccgtgactgccgccgtacctcctctggttgtccagacaggactgataaaacaccatgaaattatctgcgtactccgtccacataagggaaaaggtattatcgtcctcatgaaaggccgcgtaaagcggtgtgagtgtgtcaaagcagccaacctgcccgtccacttcggcggttttgaattccgtctgcatttgaagcgttttggtcacgagtcataagtaggctgggaagaacttgataccggcatgcttaagagctgttctcatcgctgtaatgtcgagatcgacggtcagggaatatccggtcggagccatttttgagaaatagtaaaacatctgtgccctcggccatgtctgcatgtcgagcggcgtaaatttaacagtttgatccattgtgacacctccttttttctattataggaattttcaataaaaatacaatcaacgctccgtagactgcgtaacagctcagctctgttccatttgaaaaaaatagtattttatggtaggatgaagaaaaacctgcacacaaaagaagtgagacactcacggcagccgccaattggatatgcccgcgtggcctgttgccttcgtgtgaataaacgatacaggagcatagaatgacggcttatgtaagtaaaaatgaaaaaacaaaataccggctggcagactccgtcaagcagtgcatgatgacgacgccagtggacaaaatcacggttcagaatatcgtggacggctgtgatatgacgcgccagaccttttaccggaattttaaggacaagtatgatttaattaactggtatttcgacaagctggtgctggaatcctttgcccggatcggcgtggagaagacggtctgccagagcctggaggagaagtttgaatttatcaagaaggagaaggtgttctttaccgaggcctttcgctcggatgattacaactccctgaaggaacacgattttgaactgattatggggttctatcaggagctgatcacacgcaggacccataagcctctggaggaggatattcagtttttgctggagatgtactgccgcggatccgtctatatgactgtgaaatgggtcctgagcggaatgaagcagaccccgggggagatggcggccagcctggtggaggccatgccgccgcggctttcggctgtgtttcaggaggccgggctcgtataacgcggatctgggagcggtacctggctgctggtacggccggtctgtattgatattgtatagaaataaagttacagtttgcgggatttgtaacatttgttacaaataaaggggattgtaactttattttttaaaccggttttgttaaaataataacagaaagtaaatggtgtccattggacccataaaagataggaaaaggagagattatcatggcaaacagaatcgttctgaatgaaacatcgtatcacggagcaggtgcaatcaatgaaattccgggagaggtaacaaagagaggatttcacaaggcatttattgcatccgatccagatctggtaaaattcggcgtcacagcgaaggtaacaaagattctggaagagaacggaatggactacgaggtttattccaacatcaaaccaaacccaaccatcgaaaacgtacagaccggtgtcgaggcctttaagaaatccggagcagactacattatcgctatcggcggcggttcctctatggatacctccaaggccgtaggcatcatcatcactaaccctgagtttgccgatgtcagaagtttagagggcgtggctccgacgaagaatccgtgtgttccgattctggctgttccgacaacagcgggtacggcggcagaggttaccatcaactacgttattaccgacgttgagaagaaacgtaaattcgtctgtgttgatacacatgatatcccggttgttgctttcgttgatccggagatgatgtccagcatgccgaagggcttaaccgcttccacaggtatggatgcgctgacccatgcgatcgagggatatacgacaaagggagccaacgagattacggatatgtttaacttgaaggcaatcgaaaagatcgcctccagcttaagagatgcggttgaaaataagccggaaggccgtgaaggcatggctctgggccagtacttaaccggtatgggcttctccaactgcggacttggcatcgttcattccatggctcacgctctgggcgccgtatatgacacgccccacggtgtcgccaatgcgattctgcttccgacgatcatggaatacaacgcagacgccacaggcgagaaattccgcgatatcgcaaaggccatgggcgtagagggaaccgagaccatgacggtggaagaataccggaaagcggcagttgatgcagtgaagaagctgtcccaggatgtggggattccggctgacttaacggccatcgtaaaggaagaggatgttcagttcctggctgagtctgccgttgcagacgcgtgcgcaccgggtaatcccaaggaagcaggcctggaagacataattgcgttatataagagcctgatgtaaggaaacgaagaacgggagttcggacaggctgtaatatagaagcagataaaaagaataaagacgctgtttcattgatggagagaaatcgatgaaacggcgtctttttatggattatgcgttagtttggtgtctgctttgaaaaacgggtgtaatagtttatggcatctttttccattaacgaaaaattggcctgcagcttttggataatacgctgttccgggacgttttcggaaacattgtcctgaataaagacttggatgcctttttccattcccttttccataccccgttgatatccttcatccattaacatctgtccgactaatgtcatctgcatctcctcctccaattttttagcgtacgcccggtcaatgactttgtctgtaaaagtcaggattccggctattaccttcagctggccctccctgtcaggcagtcgtttaccgagagttacggctttttcaatcgtttcctgcttgcgcttttttccttttacggtcagcggcagaatcatcagttccatcaattcttcttccgccagcttttctccggcgtcgattttgtgtttcaggcggtcgtagatctgactgccgtctaaatgaattaagtaggcggattccacgatcaggatcaggccgcctaaatcgtaccgttcttccgcacgctccacatcggccgtatagatgacaaccattttgagctgctttaaatctttcagctccctgcgaaccgcaaaacggcggatgactctggcaatgtaattgagatattttacgaagttttccctgctgaaggaggattcatagtcgatgatggctaaagaaccgtcgctcaacaggaataaattgtccagcctcaattcattgctttcgatgacaggcaggttcgtaggcaggatatccacaatctttagctccggaagcccgaaagcggcgaggctcttcccttttaatgtctccgccatcagcttggaggtaatatccttgttctgatatgcgatttcttccatttcttattctttctccttttattatacgtaaataacaggacagtttcaagagttccgtccttaaataatcaaatcgcgtcacctgcctttagtccattttttcatgagttcagggatatttttctgagattgcctgagatattcagaacatcaccatcttccggcagaacgcggaaatggataggataatcgtatgacagatgtatggaaaagtcaagtattatttactgaaataaatggtaattttgcttatactgcacataagagtttaccgcagcatatgaaaaaactggtttcccggatccggcaagtacacagtttcagcccgcctcgcctccccttacagagtccgtgtaccacccttcacaaaaatgcttctacgcatcatggcgatggaaattcttaaattcccgcggcgatataccgtactccttcttaaaggagcggtagaaggaagagtagtcggggaatccgcagctttcccatatttcctggaggggaactccggacaggattccgtttttggccgcgatcagacggcgctggatcacacagtgatgaaaggatacctgcatgtttttctgaaaggtgtgggaaatggtggaggggcttaccaggaaatgcttcgctgtcccttccagcgtaatcttttccatcaggtgttcatcaatatagcggaagagatcatccaccagaacgcttttttccgcggccggcatctgcagatcctgatagtaataggtgcggcttatgtgagccatcaggctgatgaccgcggtccgggcacagtatccccagcccggcttctgttcctccgtctccttgagggctgcggctgcagcggaaaagagccccgaccaggtcgcgcgggtggaacgcagaagatagcttccccgtttctgacactgttcgaaggcaaaattcaaatccgggaattcctcacactgctgatgccagtaggcagcgttaatccagatgacatatcgggaatacggctctcttagcggctccggaaagagcggctgatggctgactccgggcggaatcagcagaatatctccctgctggacgcggaatcttttatctcctaaaagataatggatattgccgcttttgcagagcaggatctcataaaaggtgtggctgtgcagaaagatatggccggtattgtctgtatttgtctgaatgcggatttccgtacaggaatcctgcatctgtatttctttccagtaattaatcataaggcctccatggttaaaatgtataaaaaaatgcaagaatattatgaaaaataaataaaaccacataatctgattgcaagaattacaatatataatgcaagaagcgcaatttaaattgcgaaaattacacaatataatagaactataacaaatgaacataagaatttcaagtcttatgggaagaaaaggagaggttttatgaaagagacacgaaagtttggaatcagagaccagatcgggtatgtatgcggagacatggcaggcagctttgtaaacctgtacgtcgatgcatttttcctcacattctgtacgtatgtgttgggaatcaaggcggcgtggatgggaagcatgttcctgtttgcaaggctgtgggatgcgtttaacgatccgatgatcggttcgtttccggacagatggcagattggcaaaagcggagacaaatttaaaccgtatattaagattgcgatgattccgctggctgtttccggcctgctgtgctttgccgacgtcagcagctggggctctctggcgaagcatgtctgggtcgtattcgcttacatcgtatacggcatgagctataccggaacttccatgccctttggttccatggcatctgtagttaccaacgatccggtcgagagaacaaagctttccagagcccgttccatcggcggaaccatcgtcggaatcggagccatttccctggttccccagttcgtatttaataaatcgggcgacgtggtagccagcggcttcttcaaggtagcggtggtattcggaatcttatccatcatctgctactgtctgctgctgcatttcacgacagagcgtgtccgtcagccaaagacagagggacagaagtttcattacggcaaggtattaaagagcgtatttaagaaccgtccgatgctgggcgtgatgctggcgacggtgggcagccttctgtttatcaccggcaacagccagctgggaagctatctctacaaggagttctaccatgcgccgcaggtactgacgctagtatccttaatcagtattccgattatgcttgtatttttcccgctgatcccgaagctgagtcagaaatatggaaagcgcaacgtcattttagtgtgttccggttataatcttgtgatttccctcattctgtttatggtacccattgagaatgtgtacttattcctggtggtcaacacgctggcaaccagcggacagacggcgtttaccatgctgatctgggcatttgtcacagactgcatcgattaccatgagtatcagaccggagagcgcagcgacggaagcctgtattccatctatacattctccagaaagatcggttccacgctggcatccaccatcgcctccttctcactgggagcgatcggttatatctccggtattgaagcacagacagccgttgtcgccggtcatatccgttccctctgcacctttattccggtagcaacctgcgtgctggagcttctgggcatcggactcgtatacaacctgaccaaccagaagacgacggagatgtacgcggtgttaaagaaacggagagaagaggaacaggcgcaggaatgaggggaagccgtatggataaaaagatagatattcatcttcatttgagtgaacgggcgattccggaagggcttggaatgaagatttccagtgggacggaaatgctgccgcatctggatgccctcggaattgggatgggaatcgtcatgtcgtcgggcgagaagcaggcggtgttcggttccaacgcttcatgcagaaaaattgcggagcaatacccggaccggtacgcctggatgtgtatgctggacgagacggagccggagaccgtatacgagagattgaagaagtaccgcagcgaaggcgctgtcggcgtcggggagctgactgtcaaccgcaggatggatcatccgtttttagaggcggtgtttcaggccgcggaggcgctgggccttccggtgctgtttcatatgagcccggaggaaggctttcagtacggcgtggtggatgagccggggctgcctcttctggaacggactttgcagaagtatccggacctgattttgatcggtcacagtcagccgttctggcatgagatatcaggcgacgccggagcttcccgggaagaccggtatgaatggggaaaaggcccggtgacgcctggcgggcggctggggcagttatttgaagcatacccgaatttatatggtgatttgtcggccaacagcgggggctgtgccgtgatgcgggatgagacgtttggtctcgcgtttctggagacctggaaggaccgcctgatgtttggaaccgacatggtgaatgttgacatggaattcccgctgggcagctggctggatcaaaaagcggcggagggagctctctctctggccgcatatcaggctgttgtgagcggaaatgcagaacggattttccggctgtgcggaaaccgggaccgggaatcggaaggaaggtctgcagcggcagaggcggaagaaccgtcggggaagataatagaagagaagacgatgaaaggagatcaaggatggaggaaatgagaacgagaattctgccccgtatgctgaatgacgaggtggaagcgtatctgacacgaggagatgtcatcattgttcccgtgggaacggtggaactccacgggggactgcccctcgacagcgagacggtaatcagcgaggcgtttgcccttcggatggcggaggcggccgacggactggtactgacgggtctgccgtacttctacgccggagccacagccattggacgcggaacgactcaggtcagcgtgcgggaaggcatcgactatctgggagccattgcgagaagccttcttcgccagggctttaagcgccagatttacgtcagctttcacggcccggctcacatgacctgctgcccgatggtaagagatttcttcgatgagacaggagtgccgatcctgtatatggatctgacaatgcagatgatccagagcgctaaggatttattcaagtccctggacagctttcattccattacggtcggcgcctatcagatgatggggcggctggaggatgttccgtttaccacgggatactgtcatcaggaacctcagacgacgaaaccgtttgaccatctgttcagcctggcttaccagagcggcagcatcggctactgcttcggtgatgcgaaggatcatatgagtacaccggcgattccggatgccgccagaagaaaagaactggcggatgaaggggaagtgctgatcaatgagatcgtaaagcgtctggatatgaaaacaattacagaggagatgaggtccctggaagccttcgagcaggatgtcatgaagcggtatccctggattccggcctcaggcgggcagcggcgatgagagaggaaatcatgaaaacagagtccgggccggtcaccggcggttccgcgcggctgataaaaacgccatgcggaactgtaagaggagcggtttcggcgaagggagactgcgttgtctttaaaggaatccgctacgccgaggcggaacgcttctgttatccgacggaggtgacacactgggacggtgtttatgaggcagaccggttcggaaactgttcttaccagcccagggcgttctatgacgagtcaaaggtgcctgagaaggcgttttattaccatgagttccgggagggagagtcctatacctacagtgaagactgcctgtttttaaacatctggactccgctgaatgcggagcgtgcgcctgtactgttttacattcatggcggcgggtttaagggcggatgcggccatgagaagcattttgacggcgccgcctactgccgtcagggaatcctgacagtgacgatcaattaccgtctgggccctctgggatttgcctgtatggaggaatggaaggacgagaagggatgtgtcggcaactacgccatgtatgatcagatggcggctctgtcatggatccggcgcaatatcgccgcatttggcggagacccggaccggatcaccctgatggggcagtcggccggcgccatgagcgtacagcagcactgcctctctccgctgacgaggggcagcttctgcggggctgttatgatgagcggaggcggtgtcatgaaaggcttttctcccacagcagccttaaacgatgcggaacccttctggcgtgagctggactgccgggtggtgaaggcgtgcggagtgggaatgaggaaagcggaaccgtctgtaatctttaaagagtttcacacactgacgaaggaacggccggaggcagccatggcatgcggaccgatcatagacggcgtatttctgccggagccgcccatggagatcgtctcagacggcggtgctcacgagatcccttatctcatgggttccaccagcgaggatatcgttcctccgattgtacataagatggccaagggctgggcccggcttcagtctgatatgggaagatgcccatcctacgcctttttcttcgacagacagctgccgggagatgactgcggcgcgtggcattccgcggatttgtggtatgcattcggcactctggaaaacagctggcgtccatttggtgcatgggaccgtgaactgtcggatattatggtgcggtatttttctgattttatccgcacgggaaacccgaacggcggcggtcttccccggtggcttcccatggaaaagggccagaaccgggtgatgcgtttcggtgatcatggggtggccatgggaggcgtgtccgttgccaggctgaaccatacgatgcgaacgaaaacttcggtaggagaataaagttacaatacctaaaaattgtccggattcccgtcaaaactgtcctagcagtattggcgggaaatctgttataataataacagaataatagaaggagagtgtatgggacatgttatatccgattttaacacagtcgagaggactgatggatttaagcggcgtctgggcttttaaactggacgatggccgcggctttgaagaaaaatggtatgagaggcctctggaggcagccatgaccatgcctgttccggcgtcctacaacgatctgaaagaaggggaagccttccgggatcattacggctggtgcttctaccagagaacgctggctgtgccgtcctatatgagggagcagcgtctggttctgcggtttgccgcagtgacccacattgccagggtctatttaaacggagtcctgattgcagagcacaagggaggctttcttccgttcgaggtgcagattaacgagtatctgaaagaaggagagaatctcctgactgtggcggtggacaaccggatcgatcataccacccttccggtcggcagcgaagcgggcggcggaatgggagatctgatgggaatgggaggcggaaagacatccagaaagagaaataatcccaacttcgatttctttaattactgcggaattacccgtccggtcaagctgtatacgacacctgcctcctatatacaggatatcttcttaaacgccgaggtggaaaatacgaccgcgcgcatcacgtaccatcttgagactgtgggagaggccactgcgaaaatcgcggtctatacgaaagacggcagactggcggcggaggcggagggaaccgacggtactctggagatctccgatgtcatcctgtggcagccgctctgtgcttatttatatgatgtgagagtgacttacggggaggatgtctatacccttccttatggagtccgtacggttaagaccgaaggcggtaaattcctgatcaacggccgcccgttctatttcaagggctacggcaaacacgaggataccttcccggccggccgcgggcttaaccttccgatgaatacgaaggatatttctctgatgaagtggcagggagccaacagcttccgtacaagccattatccctacagcgaggagatgatgcgtctgtgcgacgaggagggaatcgtggtgatcgacgagacaccggcagttggagtccatttgaatttcggaggcggtgcaaactttaaagacggaaaacgggtcaataccttcgatccgccggaagagggcggaatccggacacacagccaccatatggacgtagtccgcgacatgattctgcgcgacaagaatcacgcctgtgtcgtcatgtggagtattgccaacgagtctgattccggcggacccggtgcctacgcctattttaaaccgctgtatgatctggcaagggagactgatccccagaaacgcccctgtaccatcgtaagtgtccagatgcctaattacaaagaagactgcacgattgagctgagcgacgtcttctgcttaaaccgctattacggctggtatgcctgcggcggcgatctggatatggcgaaagaactgtgcagggaagaactgaccttctggaattccctcggaaagccgttcatgtatacggaatatggcgccgacacggtaagcggcttccacgacacgactccggtcatgtacacggaggagtatcaggtggagtactataaggtaaaccacgagatcaccgattccctggaaaacttcgtaggcgagcaggtgtggaatttcgccgattttgctaccagccagagccttctcagggtgcagggaaataaaaaaggaatctttacaagagacaggaagcccaagctggtcgcccactatctccgtgacagatggacgaaaataccggaattcgggtataaagagtaagagtctgacggccgtatcccgttttgcagcgggatgcggctgtttttgcaccgtctgtctgtatctgcctgcgtcctccgaccgggaaaaagggtcaattaacgtgtatgatttggttaagatatgcgtagataacgcccggaaaaatgattacaataaaactgttcagtcagaaatatggaaaataacggaggagagaaaatgagacaaaaaagacggatggttatgatggcggcggggctgttatgcatttctgcgattctggcaggctgcgcaaaggctcaggtacaggcacaggagacggctaaggagcagatgccggttaccctgtatctgacgagacacggaaagaccatgctgaatactacggggcgtatgcaggggtggtgcgattccccactgacggaagagggggcggcggtggccgaaaaactgggggctggattaaaaaaagccggaattacgtttgacgcggtttacacaagtgacagcggacgggcaattgagacggcggagctggttcttaagaacaatggacagcaggatttggctgtgcagaaaaatcccaggatacgcgaagtgtgctatggcatttacgaaggagccatgccggcggaggcatacgcaccggcagcaaaggcactgggctatgacagtgtggataccatgatgggcgcggtgatgagcggcgcgatgacgatcaatgaagccgtatctgccatggcaaaaaccgatgagagcaaaacggcagagacatgggagaccgcgcagaagcgggttatggaaggcctccgtgagatcgcggatgaggcggcccggaagggacagaatcaggtgctggtggtctcgcacgggatggccatatccgccgcggttgctgcgattgatccggaggcagaggcaggggaactgggcaatgcttccattacaaaactgatctgtgacggcgggacatttaccgtggaatcagtgaacgatatgagttatatcgaagaatagagtatcagaaactcagtcagaggggggaatcggataggaagatacggatgaaatccgtcgttcctgtccggttctcccctctgtgtggttcctgtggaagttatttccgcgggggttgttattcggtatccagttctttggcgcagctgagatagtagtggcgtccattagcactggtttccagccgggcgagttctcttaagctcccggccttccaacggcgggcattgtcacctgcgtccttcgacaccgcgtctccggcgccgagaagaaggtcgcagagttcagcggcccactggaattccgattccgtcagcgcttttttgacagcctcggaaacggcctgttcgccgcctgccagttcaaccagtctgcgggaatattcctccggtgccgtgcggtttaaattggacgggttgccgtcaaaccatcctacatatccctgatagatggcgcgcacggaccactgcacggtgccgtaatactcctgaaggtacggcagatttcggtaccgctccggaaggaccaccctggcggcagtttcatcctgggagagtccctggctgatgcaggagagcgtctcatctaagacatagcggatggcctcctgataattaccgagcacctcgctgatccgttcgcgtcccagtaccggcagcatgtggccgggaagcagggcgtcggcaggataactcctgatgcgctccagactgtccacccaggcggcgatatcgcggtactgtccgccgcgtatggcgtagagattgggccagcatccgtagtagttgtcaccgcagcacatgatccgctccccgggaagccatagaaagatctgatcatccgtctctccgaccgcggataccatctcgaaggtgactccatcgatggtgcgtatgacggaatcttcggtatagagcgtggcaggcggaagaaacgaatagacgccgtcgccgatggcgtggccttcccggattcccagtccctgggtaatgagctcttcgtcggtcagaccgtagccgaactggcggaaagttcttttgttcaggattggattgatccggtcggtgccttttaatacggcctttttcggggcaaaggcgatgatctcctccaccgtgtcccggaacgcgccgccgccgccccggtgatccgggtgaccatgggtatagatgattgttttaaccggtttatccgtgagacgggacagctcatccctcaggcgcgcggctctggcatcggagtccagggtatcgatcagtatcagggacgtatccccttccacgatgatacagttgctgtgcccccagccgactgcgattctgacacggtcggtgattgtgattagttcctttggaaacgcggtatcgttaaattctcttaatcttgtttcagcgtcattgcttaacaaacagatccctccctgtactttttcttaagtttatcatagtttcggatactttacaaatgaatggttccctgagtataatgaaagaagcacaggcgggacaggaaactgcagcgccgggtgagcgatatgtgggaaaggaaaaaagtatgagtgtaggttttacatgccaggcagtggtgaaggataaacgatttgttaagcagatgatccggatgctgggagaggagaaacggtatgaggtgcggcaggaagaggactatatgcgcgtgggattctgccggctgggagatctgttctttcagttcggttccgggctggacggggaaattccgacgcagatggtctatggggaatgcacctcaagcctggcgggagcgggatttcatgcggcggcggtccgttttgtggaggaactggccagagagacggagatggaaataatcctcagcgatgagaccggttatggagatgaccatgattttgaccggatgagagaggagcatttttatggctggctgaagaatctggtttctgtatgccgggagcgggaggaacagtggccggaggccgtttcattcggtctctgctgggatctggaccagtatacgccggaggaggttccgggaaccgtgttcacccccttcggccggttctcaatccagaaaatagtcggctgggtggagcaggagggaattgagccctttgcaaaggagttttttatctggaatgaaccgggccgggatgccggatattacagaaacacggccctcagcctgatgtgggaagagtgttattttatgccgggcagcaggagcggccgggacaggcggatcaacgaccggatcatcgatgatctggaacgctcccttctcctggacaggagccttccgtttcctgcggaggaatacataacgctctgccggttaaatgaaagggagccggagtctgtggcggacgtgccggtgtatgaagcggattatcccatcggttacagacgggggaacgtgcgggagaagatcggcagtatgacctttgtcattccgggatcctatctctatgaatacgatgaggacggcaattctcattcgtggtacgacgatctggaagagggctggcatgcggttcggattacggcgttaaaaagcagggaggagagtccggagatcacggaacggatctttagcggggcggatggcgagccggtggatggtgagaacggctgtctaaagtaccggtttgcattcgccgggacggtggaaccggagacagaggaggcgtacagccagtatgtcggtgaggtggccggcggttaccagattgcactgattacggcttcctgtgagcacagagaggatgagtgggcagaggcattttttcgaagcgtggcccattcgccggaggcaaagctggaaaaatgataaagaaatggatatctggttataataattccatcttagaatccaaggaggaacacaggatggaatttacaccctatatccgttttaacggaagctgccgggaggcggtggaattttatgcgaaggcgttcggggcggagcagccgaaggttctgacgttcggtgagagcggggagaacccagcgtggccgatgccggaggaggcgaagaaactgattatgcatgcggagatcgtcgtggaaggacggaagctgatgttttccgacacgtttccgggtatgccgtatgagcagggaaaccatattacgatcgcggtggcgcctgaggatgaggagacggccaggaggattttcggacatttgaaggaaggcggaaaggtcgagatggagctttccgagacggcctggagcagctgctacggtatggtgacggaccgctacggcatcggatggcagatgaatgtcctgagaggacagtgaccgtgcgaccttttgcagcgggcgataaagcgctttgcaaatgcggcggttagtgatatgatagatagaaatgttacaggtaaaaggattgaaacacaatgtcagacacggcaaatgatttttcaaaaggcagtatcgtagcgaatattatgaagctggcagttcccatgacgctggcccagttaatcaatgtactttataatattattgacaggatctatatcggacggattccggaaaatgccacgctggcgttaaccggactcgggctatgtctgcccattatttccatggtcatcgcgttcgccaatctctttggcatgggtggggcaccgttgtgctccatcgaacgcgggcgcgggaataagaaggaagcggaattgatcatgggtaattcctttgttttgatggttctgtttggaataggcctgaccgtggtgggactggctcttaaaaagcccatgctctatctgttcggggccagtgacaacacgtatccgtatgcggatcagtacataagcatctatcttcttggcagtattttcgtgatgatcggtctggggatgaacagcttcatcaattcgcagggcttcggtacgatcggtatgatgaccgtgctgctcggcgcgattgccaatattattctggatcccatctttatcttcactttacacatgggagtgcagggagcggcgcttgccacgattctttcccagctgctttcggccgtctggatcgtaaagtttttaacgggcagcaaggcgatcttaagactgagaacctcggcgttccggctgaagaagcagcgtgtaaaagatatcgtggcccttggcatgtcggggtttaccatggcgattaccaacagctcggtgcagattatgtacaatgcgtcgctgcagcactacggcggtgatctgtatgtgggaatcatgaccgtgatcaactctatccgggaaatcatctccatgccggtcaacggtctgaccaacagcgcacagccggtgatggggttcaattatggggcaggggagtataaacgggtgaaacgggccattgtttttatttcggtggtttccattgcctacacgacggttatgtggctgtttgtccatggctttccggaattttttatacgtatcttcaatcaggatgcagatctggtcagggagggaattccggccatgcggatctactacttcggcttttttatgatgtcgcttcagtttgccggccaatctgtgtttgtggccctgggaaaagcgaagaatgcggtatttttctcgatattcaggaaagtaatcattgtaatcccgctgatgctgctccttcctctgatgtttggactgggaacggacggcgtccttatggcggaaccggtgtccaacttcatcggcggtgcagcctgctttatcacgatgctgattacggtatggccggaacttagcggaaagaaacgtgaaaaatccaaaacgtgaaaagtccagctgcgaaactaaacaggatcaggagaatcgaagtgaaagtgataacgaaagattttataacgaatgtgctctcgaaggacaatgcagcctgtgcttccatcagatcgggagagactgtggtatttgagacgtatgactgttttaccaaccagtttctgccggaggaggcaacgtttgaaaatgtggtgagaaaaccggggaatccggcgaccgggcctctgtacattgagggagcgatgccgggggacatgctcagaattgagattctggacatcgaactggggcctgtcggcattgtgatgctggggccgggcagcggaagtgagagaacggaatttccggaaaagatactgaaacgtgttcctgtcaaagacggaaaggcatactacgacggcaaagtggagataccggtagaaccgatgatcggcgtgatcggagtggcccctgcggcggaaggcgtttccaccataactcccatggatcatggcggtaatatggactgcacccagatcaaaaaaggcgctgtgctgtatcttcctgtctttgtggaaggaggccttttatcgatgggagactttcacgccatcatgggagacggagaagtggaggactgcggtctggagatcgaaggccgggccacggtacacgttgacgtagtgcggaatcaatactgtgtgccttaccccatgattgagacggaggaccgtctgattaccatcgcgtcggcggaggacgtggaaggtgcatggagggccgcgacgagacagatgtttgattttatgagagaaaagattgggatgagtgtttcggacgctgggatgcttttgacgatgacaggcagcctgatcatctgtcagaccgtgaatccgatgaaaactgtcagaatggaattgcctcgttatataactaaaggttatggcttttattcgatctttggctcatgaggaaaatgtcttgacttttatatggaaaagtataataatgaaaaaaattaagaaacacatcatctagggaaagaggaagatacgtatggaaaagaagaacatcgactggggaaatttaggctttggatacgtacagacggataaaaggtatgtatccaattttaagggcggagcctgggatgagggaactctgaccggggacccgaatattgtgttaaatgaatgcgcgggtgttctgcagtatgcacagaccatttttgaagggttaaaggcttacaccaccgaggatggacgtatcgtgaccttccgcccggacttaaatgcagagcgtatggagaattctgccagaaggcttgagatgccggtgttcccgaaggagcgtttcgttgaggccgttacgaagacggtggctgccaacgcagcgtatgtgcctccgttcggcagcggggcgactctctacgtcagaccgtatatgtttggaagcaatccggtaatcggagtgaaaccggcggatgagtatcagttccggattttcactacgccggtaggaccgtactttaagggcggggtgaagccgcttaccatctgtgtcagcgatttcgaccgcgcggcgcctcatggtacaggccatatcaaggccggtttaaactacgccatgagcctgcacgcaattatggaagcccaccgcgccggatttgacgagaatatgtatttggacccggcgaccaggacgaaggtggaggagactggcggagccaacttcctgtttgtgacaaaagataagaaggtggttattccgaagtctgaaagcatcctgccgtcgattacacgccgttccctgatggtggttgccaaggagtatctggggctggaagtggaagagcgggaagtacttttggaagaggtgaaggacttcgcagagtgtggattgtgcggtaccgcggcggttatctcccctgtgggatgcattgtggatcacgggaaagcgatctgcatgccgagtggcatgagcgagatgggcgaagtgacgaagaagctgtacgacacgctgaccggaatccagatgggacgaattgaggctcctgagggatggattcatgtgattgaataaagggataaagaacgggcgcggcacgtgatgtgctgcgcctgttctgtgtcaggagtgctgtttctaaccagtccggaacctcacagcccgggaactgttacacacgtcaggaaggttcaccagcggaggcgggatttgtttattgccttttgtttttttatatgctatacttgctttactaatttccattgatatctggaaatctaatgccatgatccggcatcagggcagttctgccaaaggattctcaaagaattgataattgaaaaaagagagggagtgatctgtctgccattattgtaagcaggctttatcagagtaccggtttttaaaaagccgcggcggtaatggttaaaaatctgttgaaaaatacaactggtttcagtataatggaggtaggaaacatggtaaaagtgaataagaaatacaaagacagattatttcgaatggtattcaaccggaaagaggagctgctttccctttataatgccgtgagtcattcggagtacaccaatcccgacgatcttgagattaacacgctggatgatgtcatttatatgaaaatgaagaacgatcttgcatttttgattgatgacgttcttaatctctgggagcatcagtcgacctggaatccaaacatgccggtacggggtaccttttatatcgtggaagagtacaggaaatacattgatcagaacgggctgaacctctatggaagcagcaggattacgcttccagtcccccaattttatgtgttttataatggattgagggaggagccggattacatcgaactgaagctttcagatgcattttcccgcgtccactcagaggtggaaccgtgtatggagtttaaggcggttatgttaaacatcaatcgcggccataatgaagaactgatgaggcagtgtacgactctcagagagtatgcggagttcgtggcacggatccgggatgaaacggaagatgggacggctctggaagaggcggctatgaacgtgatggattcctgcatccgggatggaatactggcggagtttttgtctgtacacagagcggaggtgttcgaggtgctgttgacggaatatgatgagcagaggcatatcgccagtgaaaaggagataagccgcagagaaggacatatggaaggcagaacggaaggaatactggaaaaggcaaaagaggtggcggttaacctgattaaaaaaggattcactgtggaggatgcggcctcgatctgcggagaagatatttgcagggtcaaggagtggcatcgggagtggaaggccgcaaaagaatgcagatgaaacaaatttggttaaaatggggcttgcctcactggatattcagtgggcggctccttttagcatgaggagagaagccgggggggaagcgtggcacatcataggtaacttacagcgatacaggcggcgattgctgccatgaatgaaattaaaacagaatcggtaattttctctttacaaaatgttcataacaggttaggatagaaattgtgtgcaaattttaaaaggcaaaagacggccggggaaatggccgggaggggacgggatatgacagcagtactgacaaaagcatttgcgtttgttgcgatcattgccatgggctatattttgaagcgggttggattttttcatgcaaaggatttttacctgatttccaatatcgtgattaaaataacactgcctgcggctattgtatcgaatttcagcaagataaccatggattattcactgcttgccatgtgtgtaatcgggcttctctgtaattttgtgacgatcgctgccggatatggaattaatataagaaagtcgaaggagacgcgggcctttgccatgctcaatatgtcgggctacaatatcggcaacttcaccatgccgtttgtacagagctttttaagtcccgtgggatttgctgccaccagtctgtttgatgcgggaaactccatcatgtgtacggggatgacgtttacgctggcgggaatggtggtgggagaggatgaaaagccgtctttctcaggaatgacgaagaagcttttttcatcgattccatttgacgcatatatcgtcatgacaattctcagcatattaaaactgcagcttccggcggtaatgatcagctttgcggatacagcaggcggcgccaatgcatttctggcgcttctgatgctcggaatcggattcgaagtccacatggaccgggagaaaatcgcacagatcgtacagattcttgtgatgcgttacggtatcgcggtactgatggctgtgggcttttacttccttgcgcccttcggactggaagtgcgccagactctggcaattgtgtccctgggaccggtggcttccatcgctccggcatttacaggggctttaaatggagatgtcgagatggcgagcgcggttaattccctatccatcatcattagtattgctgcgattacggcggcactgattcttttgctttaaaagttaaaactaagaaataagaggagtacagaaaataatgcatcagaaaagaagccagtgggcaagcaatgtgggattcatactggcggcggcaggctctgccgtcggcctgggtaatatatggaagtttccgggaaaggtgggggcttacggcggaggcgcgtttattctctgctacatgattatcgtcgctctgattgggtttccggtaatgctggccgaattatcaattggaaggaagacgcagaaaaatgtgatcggagcgttccggcagttggataagcggttttcgtttgtggggggaatcggcgttctgacgctctttgtaattatgtcttactacagcattgtgggcggctgggtgttgaagtatatctgggtctatgtgagcggtgcgcattttgggaccgggctgaatccgtatcagacgtattttacggaatttatagcgaagccggcggaaccgctgctctggggagccgcctttcttctcctgtgtatctatgtggtggttaaaggggtatcatccggaattgagcgggtcagcaaggttctgatgcctgcgctgtttctgctccttctggcctgcgtaatccggtcggtcactcttcctggcgcaaaagaagggctctcatttatgctgacgatccggccggaaacattgaacggcaacacactggtgggagcattgggacaggcattcttttccctttctgtgggcatggggattatggtgacgtacggttcctacgttccgaaggacgaccatctggtgaagagtgcggtcagcatctgcgcgctggataccatggtggccatcctggcggcctttgcgattattccggtcgtgtttgccacgctgggagcagaaggcctgggcatgggaggcggatttgcctttatggcgctgccggaagtattcgccggttttccgggcggcaggctgttcggactggtattcttcatcctcctgttctttgcggccctgaccagtgccatcagtattctggagagctgtgtggcgtttatcagcgaagagtttcatttcagccgtctgaagtctaccatagtcttgtcggttccgatgacggttttgagcgccggatactctctgtcacagtctgatgcgagaggcatcaggcttccctggttcgacttctcgcaggggcttaccatgctgccgatgaatgcagtgatggaaaaatttacggataacctgatgattcctctgggcgcgcttgctttctgtctgtttgtcggctgggtatggggaacgaagcatgcggtggaggaaatcgaatcggagggaagatatccgatggtgatgaggagaagctggagctttatcattagatttctcgcccctctggtcatcgcggtgatcctgtactttacgctgggacgcggtgaagggctttcctgaatgaaaaacggacgcggctgccggaagcaagggctgaactgctgccgaaaatggcaaaaaatggttaaaattcctttacaaacagcgtaagtcggtttaagatgaaagatggtatttttgcagtgtcaaaggattctgaatcaaaggaaagcagaataagtatttgggagactgaaaagtatgttgcctctgagaatggggaaactgatagaaaaggagaacgtgagatgaaaataacattaaaagacggttcagtaaaagaatatgatcaggcggtgtctgtatatgatattgcggcggatatcagcgaaggccttgcgagaaatgcctgtgcaggtgaagtagacggcagggttgtggatttgagaaccatggtggatcgggactgctgtctgaatattctgacagttcatgatccggccggtctggcggcttaccgtcatacgacaagccatgtgctggcacaggcggtgaagcatctctatccggaggctaagctggctattgggccgtccatcgagaacggtttttactatgattttgagacaccgtccttttcgagggaggatttagacaagattgaggctgagatgaaaaagatcatcaaagcgggtgagaagctggaacgttttacgcttccccgcgcggaagccgtcaaattcatggaggaaaagggagaaccgtataaagtggagctgatccgggacttaccggaagatgcggagatttccttctaccgccagggcgactttacggatttgtgtgccggacctcatttaatgagtacgaagccgatcaaggcctttaagctgacctcttcgtcaggagcatactggaggggcagtgagaagaacgccatgctgacccgtgtctatggaacctcatttgcaaagaaggaagaactgaacgagtacctggagtatttagccaatatcaagaaccgcgaccataataaactgggacgtgaactggagctgttcgctaccgtggatgtcatcggccagggacttccgttactgatgccgaagggggcaaagatcatccagacgcttcagagatggatcgaggatgaggaagagaaacgcggctatatgaggacaaagactcctctgatggcgaaaaaggatttatatgtgatttccgatcactgggatcactacaaagaaggaatgtttgtgctgggcgacgaggagaaggacgatgaggtgttcgcactgcgtcccatgacctgtccattccagtattatgtatacaaacagagccccaagtcttaccgtgatctgccgtgcagatacggcgagacctccactcttttccgcaatgaggattccggcgagatgcacggcctgacccgtgtgcgccagtttaccatttcagagggccatctcgtggtgagaccggatcagctggaggaggagttcaagggctgtgtggatctggcgaaatactgcctgacgacgctgggactggaagaagacgtgacctaccgcatgtccaaatgggatccggagaaagccgaccattatctgggaaatgccgagatgtgggatgaggttgaggctgccatgagaaagatcctcgacgatatcggaatcgaatatacggaagaagtgggcgaagctgctttctatggtccgaagctggatattcaggcgaaaaatgtctacggcaaggaagacaccatgatcaccattcagctggatatgttcctggctgagcggttcgacatgagcttcgtggataaggatggtacaaagaaacgtccgtatattatccatcgtacctctatggggtgctatgagagaaccctggcatggctgattgagaagtatgagggcgcgttcccgacatggctgtgcccggaacaggtgagagtgcttccgatttccgaaaagtatcatgattatgcggaaaaggtggagagcgagcttaagtcaaacggcattctggcaactgtggatgagcgcgcggagaagattggatacaagatcagggaggcgcgcctggcgaagcttccatacatgctggtagtcggacagaaggaagaggaggacggccttgtgtctgtccgcagccgttttaacggagacgaaggacagaagtccctttccgatttcattgacgccatcagccgcgaaatccgtacaaaggaaattaagacaattaatgtcgaatagttcctgtcccgtctgtgcataataactcctgcagaagcgatagaattttagaattctcaaggagggatattccatgacgagattagactgtaacgtgacaaactgccttcacaatgcggaaaactgctgctgtaaggctgcaattatcgtagaaggcgagcaggcaaaagatacgtgtgatacgtgctgcggcagctttgacgagaataaggacggcgcttaccataacctgttcaaaacaccggaaaacaggctggaggtagactgtgaagcagtgaactgtgtgtacaacgaaggccgccactgttcggcggatcatatcggaatcgcaggagacggtgcgagagaggccagtcatacagaatgcgcatccttcagggaaagatagaagaagcgcaatagaacgatggggctgttgcaaaagcagataaataatctgctggagcagcagctccttttctgcgtcaaaaaaacagaaaagagggtgccgcccaatcatctgttttgatgattttgcggcaccctttcgtgcctgctacagaatcataaaaaaggttccggccgtaatgagcaggattcccaccagttttttaatggtgatctgctcatgcaggaagagaaaggccagaatgacggtgagcacgatactgaacttgtctaccggtaccaccctggaagcctctcccatctggagcgccttgtagtagcagatccaggaggcgccggtggcaagaccggaaaggatcaggaaaatccagcttttcctgccgatatcagggagaccgctctgcgtgttggttatgaacacgacggcccaggccataatcactaccacgacagttctgaccgcggtagccaggttggagttgacgccttcaatccctactttggcgagtatggacgtcagggcggcgaaaaccgatgagaggagagcgaatagaaaccacatggctgagattccacctttcatatagttccgtgcgcctccggctatttttctgcctgccgtaagcgctgggacggataagatgattgtaatatatttttcgatgaaattcaattaaatcagcctgtaaaagttcggagcagtaattgtaactccgcggattgtgttagaaaaaaaacaatggcttgacaggagttgtcaccacatggtagtatgaaactataaaaaagttagattacctaaaatttttttagagttggaaatagtgaggaatgacaatgccgggatactgttttgagcgtaagagattttggtgtttcaattatacagggtgtaagagagagagcagctgatcaggctgctctctttttaactttgtataatttttcacaatataatgaggaggtaggaatcatgatgaaagaaaacacggaacattgctgctgcgaagggtgtgacagcagtcctgaaactctgcttggacggattggggaactggcttcggagtacaggggaaaggaaggatcgctgatatcggtgcttcatatggcacagggaatctatggatatctgccgctggaggtacaaaaaacggttgcggatgcgctggatcttccgctgtccgaggtatcgggggtggtgaccttttattccttcttctccactcagccgagaggagaacacaccatccgtgtctgtctcggaacggcatgctacgtgcggggaggaaagaagatatcggagcggcttcaggaacttttaaacgtgaagatcggcgatacgacagaggatcggaagttcacactggaagtggcgcggtgtatcggggcctgcggtctggcgccggcgatgtctattgacggccaggtttataaacaggtgaatccggataaactggagcagattcttgcgagatattatgatgagaatgctgagtgctcataatggggaggaataatgggatggaaagaaaaataaaaaattctgccatgcttgcagaaataaaacaggattacatagaaaaaagaaaatccttcaaacgtcaggttctggtctgcggcggagcgggctgcatctcctctcactgcggagaggttcaggaggcgcttaagaagtctctcgcagaccatcagctggagtcggaggtagagattctggtgaccggctgtatgggaacctgtgccgcggggcccgttcttctggtggaaccggatgggattttctacacggccatgaatccgcagaaggtagcggatctcgtggaacgccatctggtacacggggaagtctgtgaagaatatacgttctacgataccgaggaggagcgttacattccgaagctggacgacattcctttcttcaaggagcaggtccgcatcgcactgcgcaactgcggacgcatggaatttgcctctatagaagcttatatagcgagagacggttacgcagccgccgcaaaggcactggatcacttaagcagggaagaggtggttgagatcgtgaaagcctccggacttcgcggccggggcggcgcaggattccccacgggaatcaaatgggaatcaggcatgaaagccgtgtcggaggacggacagaaatacatggtctgcaacgccgatgagggggatcccggcgcgttcatggaccgcagtattctggagggcgatccccacagcatcatcgagggcatgatgctgggcgcctacgccatcggtgcggacaaaggatatgtctacgtcagggcggaatatcccatcgcggttgaacgcctttccgacgcgatcgggcaggcgagagagagaggactgctgggaaccgatattctgggaagcggatttcagttcgatctggagattcggattggcgcgggcgcgtttgtctgtggtgaggagacttctcttctggcctccatcgagggaaaacgcggggagccgagacagaagccgccgtttccgtttgaacggggcttattcgataagccgaccattatcaacaacgtggagactctggcaaacgcagcgccgattatcctgaacggagccgcgtggtaccgtcagttcggcacggaaaagagtgcgggcaccaaggtgtttgcccttgcaggggacattatcaacgcgggaatcattgaggttcctatgggaatacgtctgggagacattatctataaaatcggcggaggcatcaccggaggccggaagtttaaggcgatccagtccggcggtccttccggcggctgtctcaccggggaacacttaaacacggcggtggattatgaatccctggcaaagctgggggccatcatgggatccggcggtctggtggtcatgagtgaaaacacatgtatggtcgataccgccagatattttatggactttatccgcgatgagtcctgcggcaagtgcctgccctgcaggaacggtacgaagcgcatgctggagattctggaacggattacggagggcaggggagaagaaggtgacttagagcttttggaggagctggctgagacgatcaggcagacagccatgtgcggcctgggccagacagctcccaatccggtgctttccacactccggtattttagaaatgagtacgaagaacatatttatgagaaacactgccgtgcaggagtctgctccgaactgcagacttcgccgtgccgcaacgcctgtccggccaatgtatttgtaccgggctatatcagccttctctccgccggacggtttgaggacgcgtacaggctgatccgtcaggataacccgttcccgtctgtctgcggccgtatctgtacgcatccgtgcgaggaccgctgccgccgggctcaggtagatgaagccgtttccatctgctcgctcaagcgtttcatcggggactacgtgcttcaggatgggtatgagattccgaaggtggaggcaaagccgtccacaggaaagcggatttctgtcgtaggcggcggcccctccggtttaacctgcgcttactatctggctaatttaggtcatgaggttcatgtctatgaggcggaaaatgtcgccggcggagtcctctactggggaattccggagtaccgccttcccaaggatgtgctggcaaaagaggtgaaggccatcgaacagagcggcgtcagcatccactgcaatgtgagagtgggagagacgatttccttcgaagcgctgaaaagccagagcgacgccgtctatgtggcgatcgggacacagcagtcgagaacactgggcataccgggagaggatttaccgggagtggaaaacggcctgattttcttaaaacggatcggtttaaagcagaatttcacggttccggaacgccttatcgtcataggcggcggaagcacggccatggacgtggcgcgcacggcggttcgtcttggctcgaaggaagtgacggtggtttaccgcagaacagagagggagatgccggcgggagccgaggagattcaggaagcgagagaagagggaatccgtatcatcaccctggcttctccggtgagaattatggaacgaggcggcgcagtctgcggcatcgaactggtaaaacggcagcttacggactacggctcagatggacggcgcagaagtgcgcatatcgagggctctgagtttgtactggagtgtgacggcatcataacggcgatcaaccaggatgtagatcacaaattccatcagacaacccagcttgatttcgacggaaagggcaggatcgacgttcatcagtttaccagccgtacttcagaggaaggcgtgtttgcaggcggcgatacgagcccgtggggagccaacgtagccgtcaatgccatcgccgacggaaagaaggcagccgtcaatatcgacaagtacttaggcggcagcggagaactgaatatgggtgagtggatggagattccggtgattccggatatggaggtgaccgagccgcatatgagattcccggtcagaacgcttcctgtagatgagaggatcgacaactttaaggaagtggcgtgcggcttccacaaattagacgcaatcggtgaggccttccggtgcctgcactgtgacaggaggtaagagagatgataaagctgacaatcaacggaaaagcaatagaaatagaagagggagcgacgatcatggaggcagccgccggagccggcatcaaaatcccgagcctctgtcacttaaaaggcgttcatacctacggttcctgccggatctgcgttgtggaggtagagggaatgaaaaatctccaggcttcctgtatcgttaaggcgcgcgaaggcatggtggtgcatacgaactctccaaaggtgcgcgcggccaggaaggtcctgtacgaactgctgctttccgaccatccgaaggactgcttaagctgcggcagaaaccagaactgcgaacttcaggagctgggttatgaactgggggtcacggagagcaggctggagggagaacgttcgcagtgtagcgtggatatttccccttccatcaccagggataccagcaaatgcatactctgccgccgctgtgtgaccgtgtgcaacgagattcagcatgtgggagccatacaggcgcagaaccgcggctttgatacggtgatcagtccggccatggggcttccgcttaattccacggcctgtgcgatgtgcggccagtgtacggtagtctgtcccaccggagcgctgcaggagaccgatggactgagccgggtgtggaaggctctggctgatccgggcaaacgcgtggctgtctcagtggcacccgctgtccgggcggctcttggcgaagaattcggacttccctgcggaacacccgtaaccgggaaaatggcttccgctctccatgaactgggctttgacgatgtgtttgacactctgttctcagcggatttaaccatcattgaggaaggaacagagcttcttcagcggcttcaggccgtgctcacaggaggagatgcggttctcccgatgatcaccagctgttccccgggctggatcaagcatattgagcatcagttcccggaggagcttaaccacttatccacctgtaagagtccgcataccatgatgggagcggtggtaaaatcgttctatgcggaccgcctttccatggatccgaaggatttatacgttgtctctgtaatgccgtgtacggcgaaaaagtatgaaatccagcgggaggagatggaggtagacggaaaccgcgacgtggatgcggttattaccaccagggagctggcgcggatgatcaagtcggcaggaatcgatttcgtaaatctgccggaaggaagctttgacgcaccgctgggactctccacgggagctgccgatatcttcggcgtaaccggaggtgttatggaggctgcactgcggaccgtatacgagctggtaacgggaagggaactgccttttgaggggctccatgtgacgccaattgtggggctggaacagattaagactgcgagcttcgtcatagaagatacgcttccggagtataagcatctggagggtgtggaattgaagatagcggtcaccagcggactggaaggagcctccatgctgatgagagaggtggcggacggtacttcgccgtaccatttcattgaagtcatgggatgcccgggaggctgtatcgcaggcggcggccagccgcgcccgaaggacgaggatttccgcaggaagcgtgcggcggctctctacagcgaggatgagcacaaacctctgcgcaagtctcacgagaatccggatctgatgaagctttatgaggatttcctgggagagccgggaggtcatctggcccataagcttctgcatacccattatgtgaaacgcgggaaatacaacgagctggtataaaaccggtataagaaatgaagaaagagacggtttcctcatgaaacaggggaatccgtctcctttgctgtacctggatcgcctttgggcagaagctcatgaggaacgtaggaaatagacaaccgatcttcttccgggaggccgttgtagaattccagccattcaagggtatcctcacttaagtctgattcctgaaaaaaatgtccctcatattccacggtaccgtctgacagaaacagggtgtaagaatccccggtccggaccgccatggcgccgtcccagagagagatgtatccgtcaccctttcctccgaagttggcctgaccgttctccgaggggacgattaaagggtcaatgatggaagaaaaactgccgtcctcggttccgcaggtggggtgtgcggctctgtccgtactgataaacagggtatctctggcataaaacatgggagaaagcggagctttttcgatctgccccatctccattaaggaagcaagagtatggggatcaatggaagcgcggctcccttttctgagcagttcgcacccatataccgtggtctgtccgggccatgtctccataatcagccctgttttcatcgatacggcatcgccgtcctccagggtatttaagacacttctgtcatcggaagcgtacgaaaagcagacagggccgtaatcgtcaatcacgaggatgccgtccccgtccgtggattttaaaaatctgccggtgcactcggagacgtcggaagggatttccgttccggtattttggcttgctgccatgggttcctctgccatgggttcctcggtcacgccttccacggtcgctgccggatcatcagccggtaccggactggcctgccggctggaacaggcgctgagggcggcagtgagcagaagggcggaaaacagaattattttcttattcaaggtgagttcctcctgttttttatactgcatctatggtatcatcattttatatgtttacaataccacaatcttacttttggttctttacttattccttgcaaattccgtaagattcaaaggcagaaggggatatggcggaggacggatgtgaaaacagtctgaaattattaaaaataaatctgcaaaatccttgacatttctctccgtttattgtagactataacaagttgtggaaacaacagtcaggaaagtaggtatccgcctcaccacggcacgagtaagtgaccctggttcatagccttatttacataggtattctgtgtagagactttgatggtgggtagcgtttgtctatctactttttttgtgccctgacgggcagtaatgtgaattccgaccaaacacactataggaggtgcacgacaattagcgatttaatgattaacgaacaaatcagagataaggaagttcggttgattggtgaagatggagaacagttaggggttatgcctgcgagagatgccttacagatggcgaaagaagcagagctggaccttgtaaagattgctccgaccgcaaagccaccggtttgtaagattatcgattacggtaagtacagatacgaactggcaagaaaagaaaaagaagctaagaagaaacagaaggtaatcgaagtaaaggaagttcgtttatctcccaacattgacacaaatgacttaaacacaaagatgggcgccgcaaggaagttcctcgaaaaaggagataaagttaaggtaaccttacgtttcagaggtcgtgagatggcgcatatgtcaaagtcaagatatattcttgaagatttcgcaaaggaattagccgatatagcggtgattgacaagccgtccaaagtggaaggaagaagcatggttatgtttttaacaccaaaacgttaatagaacattatcaaggaggaaaatacaatgcctaaattaaaaacaagcagagcagctgcaaagcgtttcaaaaagaccggtacaggaaagcttgtaagaaacaaagcttacaaatctcacatcttaactaagaagtctacaaagagaaaaagaaatcttagaaaagatatcgttacagatgcaaccaacgcaaaagtaatgaagaagattttaccatatttataggatcttaagttaagaaggaggaaaaaccgatggcaagaattaaaggcggtatgaacgctaagaagagacataacagagtgttaaagatggctaaaggctacagaggcgctcgttccaaacagtatagagtagcaaagcagtccgtaatgagagcattaacaagctcctacgcgggaagaaaagaaagaaagagacagttcagacagttatggattgcacgtatcaatgcggcagcaagaatcaatggcttatcctacagcgtatttatgcatggattaaagctggctggtgttgatttaaacagaaaagtcctggctgacatggctgttaatgatgcagaaggcttcgctaaattagcagaactggctaaatccaaagtagcttaatgataaataaatcccctgtaaacattgtgtttacaggggatttttgcattttgacgatctgtgggatcagtatctccggtcctctaccagcagggtctggatggtatccggggaagtattccagtttaacacatagagcgtgtagatccttccgggccgcatggtgattgtggtggtgacgagaggcacctgcggccgtgcagaacgggccacgttaaccgtataggttccgctcatcatggagctgaagctggctgcctgtttaaagttaacggagttaaagtagacattgccaatgacagcatttacggggccgctgtaataagccagattgcatactctgaagcatgcatttgcattgggcgtaggacatgtagtgtcggcgatggatgtcaggtccagaccggtgtctgaattgatgattgcgatggttgccatgccgtctccgacgtaaagggatttctggagataagtatagccgttggcaacgatcgagaatctgtgatatccctgcgtgatctgctggtatctggtaagctccgggaactcaagattggagtaaaccggccggttgtcaatgtagatcgtgaatgcattatatccggttgcagcattcagaaaccggatgcttccgcgtgcccattgattgttattacagaacaggcatggcattggcgtcggaatgaaaggcggataaatggggcggtccgggaagggacggtcaggaggataggggcggtccgggtagatgggaggcataactgaaaaatccggatctatatcctcgtcgaacggaggaatcactgtgttgtagtccggcaccaaaaatcccggatcaacaggttcgtcgtctgcctgtgcggcagaaagtgggagcgtttcaaattgagtcataagaacttccttattatcactttataattagtatattgctgtttttttaaggagtgcccctaatttgatgattttacgtaaaaaactttggcggcattaacagaaatggtcctgaaatgagaggagaaagggagagaagaaagtacttgctttttaaaatgcacaacgaaaaacatataaaatttaatgataatcattaaaaatacttgataaacaaaagaacaggtggtatagtaaaagaaaaagcagtcaatctcacagaggaggagacaaaatgaaagagaacgattttaatctggataccaccgtacgggagaaaaaagtttttttaaagaaaattcgtatagtgtttactgcggctttgtttttgaccggcgttctgtcgtttctgggactgatgatgagcgcctggggaatcaaaaacaggatctggctgcaaatgggcctggccgattttgtatggaatatggttttgaccgccgtgatgattctggttttcgtttccttagttaagatcgctgcagacgaacagccattttccaggacgctgacgtggagcattcgcatgattggcattctgctgctgactgcatcgttcgtgataccgagactggaggggtatcagtcttccggttatgaattcctgtctcgggggagttttgtactgattgacgcggccatctttattcccggattactgttcgttattttagggaatatcattatggaagggttttccatgcagaaggaaatggatgagatcctgtaggagggcggaagatggctattattttgcgattggaccgtgttatggcagacagaaagatttccttaaacgatctttctaaaaaggttggaatatccaccgtgaatctttccaatttaaaaacggggaaggtaaaggcaatccgtttctcgacgttagatgccatttgcagagaactgaactgtcagcccggggatatcctggaatatacaggagatgcggactgaaaaacgaataccattcagaatcgtcaggggaatgctcagaatctgcaatgaaatctctaaaaaatgaaggaaagaaaaaaatgttttattatgcatgatatctaaaataatttaagaacacctaaaaaatatattgactttaataagaaaactgcttataattaatcttatcaaatcaatgtttttgtgaaaaatgaatagaaataaccgtatgcatcttgtatatgtccgggataatggcctggacgtttctatccgacttcctaaatgtcagggctacaggagcagcttttatgctgcctgtctccggcagccgggaagtcttttttgatcagccgcacgatgatgcggtccgtcaaaaaaggcgggcctggcggtccggaatgacacgcaatacggcagattccgattcttatggtaataagggggtgaacgacgactgaaaatgcgccgtagatgaaggaaactgcagacgggggtgctctgacctgcgggagggagcagaacgcggacagtttggcggaagacggcaaaaacattgaaataaagagaatgataaaggagaatatcatgaaaagcaatgcagaaatcagcattaacaacatttacaggctggacgggcgcgttcctctgggaaaagcgattcccttcggcttacagcatgtgctggcgatgtttgtggcaaacttaacgccgatagtcatcgtgactgcggcggctggcttagagacgagccagacggcggctctgattcagaacgcaatgttcattgcgggagttgccacgctgattcagttgtatccggtctggcgcatcggtgcaaagcttccaatcgtgatgggggtcagttttacattcgtgacaatattaagttctgtaggagcgaaatacggctatccggcaatcctgggtgcaatcctgatcggcggcctggtggaaggaactctgggcctcttcgcaaagtactggaggaagctgatttccccgatcgtatcggcgtgcgtcgtaacctccatcggtttttcccttctgacggtgggagcgaggtcgttcggcggcggatattccgattcgtttggctcggcaacgaatcttctgatcggcaccgtaacgcttttgagctgtattctgtttaatgtatttgcaaaatccttctggaagcagctgtctgttctgtttggactggttgtcggctatgtactctcgatattcctgggcgtagtggatctgtcgggactgctcgacggcgggatcttatcccttccccgtattttaccgtttatgccggagtttcatgcgggcgcaatcctgtctgtggttgtgatctttctcgtatcggcaactgagactatcggagatactactgcaatggtggcatccggtctcgatcgtgatatcacggagaaagagatttcaggctctctggcctgtgacggatttgccagcagcatatcctccctgttcggctgtcttccggttacttccttcagccagaacgtgggactgatcgccatgacgaaggtcgtcaaccgctttaccattatgacaggggctttctgtatgattctctccggacttttcccgccgatcggcgcctttttcgcctctctgccggatgcggtgctggggggctgtacgatcatgatgttcggttccatcatcatcagcggtgtgcagatgctggcccgtgccggtttcagccagagaaatacgattatcggttccctttccttaagcgtcggaatcggctttaccctgctccctgaaatctttcagattttcccgtccattattcaggacgtatttgcagaaaactgcgtagccgtcgtatttgtgcttgcaatcctcttaaatctgattctgccggaaaatatggatattgagaaggctgtggaggcacaggaataagaggttttatgaaataaaaaaagatcagatatcgcagaagatatctgatctttttttgttaccgtctggtaaaaactccccgagtaggacttgaacctacgacagcgcggttaacagccgcgtgctctaccgactgagctatcgaggaatatagacactattatactcaaaggaaataaaatgtcaagagggttttgtaaaaaaaattataaaaaatcagcaaacgatcacaaagttaaagatgtgttaagtattctgataaaggattgaatcctgctcatgattgtgctaatttagccatatcataaaaagagaggtgtatgatgacagaacatttgcgtaaattgagccccggccggattgtcgttctgggctttgcctttgtaatcttaacggggagcctgattctgtggcttcccatttcggccaatgagggagtggacgtatcctacatagacgccctgtttacctccaccagcgcggtctgtgtgaccggactgatcgcggtggatacggcggatacgtttaatgtattcggaaggacggtagtggcgctcttaattcaggtcggcggcctgggcgttacgtgcgtcggcgtcggcgtcattctgctggccggaaagaaaataggcatccacggccgcgtgctgatccgtgattccatgaatttaacgactgtaaagggtgtggtcaggctggtagaggcgatccttttcatgacgctgctctttgagggcgcaggcgcgctcttaagtttcctggtgttttcgaaagactatccgccgcttgacgcgctggggatcagcgtgttccattccgtggcggcgtttaacaactccggttttgacattttgggcgggctaaaaaacctgatcccgtaccagtccaatgtactcttaaatctgacgacctgcggactgatcatattcggcggacttggattcctcgtgattcgggaaatatgggaaaaacattcctggcggaaattcagccttcacacaaaagtggtaattgcaacgaccatcgcgcttctggccgccggtaccgtgcttttaaaaatgacggaggacatcacctggctgggagccctcttccagagcacctccgcgagaacggccggattttccacctatccgatcggagcattctcgaacgcagggctgtttgtcctggcggttcttatgttcctgggagcatctccgggctccaccggaggcggtatcaaaacgacgaccaccttcgtgctgatgaagagcatgttcagcgccgcgacgaacagacactgcagtgcatttaaacgccggattcccacggaggtggtgtcccaggcgtttctcattgccatactggcgcttgcggtggtctgcgtgcagacctttctcatgtgcatcgctgaaccggaactggattttatgaaattactgtttgaaacagtcagcgccttcggtaccgtcgggctgtccaccgggatcacgccggatttaaacgcgggcgcgaagctgattctgatcaccaccatgtttatcggaaggctgggaccgcttaccatggcgaccgtgtggagcttcaaaccgaaggcggcggcctggtattcggaagaatcaattacaatagggtagaggagagaacgagatgaaacgtcgaaatgatacgatagaatatggaattattggcctgggaagattcgggaccgcattggccacggccctttcggaggccggaaaagaagtgatggtggttgacaatacggagagcaaggtgaaacagatccgtgacctcgtttcggaggcctttgtcgtggaggggattgaccgtgactcctttgagagtgccggaatccagaactgcgagacggtgattgtgtgtattggagagaagattgataccagtatactggctacactgactgtaatctccatgggagtgccacgcgtaatctcgaaggccaccagtgcggaacacggctgtgttctggagaagatcggcgctgaggtggtatatccggagaaggatattgccatccgcttagcaagacgcctcgtatccccgcatgcgctggattttatcagtctaaacgacgatattgcggtatcggaaatcaggctgacaagtgtactggagggcaggagtgtgatggaagccggaatccgcaaccggttcggcttaaacatcgtggcgatggagagggaacgggatacgacgatcgatattcagccaacgtaccgcttccggaaggaagacgtgatcgtggtaatcggaaagcgcgatcatataaataagtttgaacggtatctgtcagaagaacagagatagatgaaaagagtgtccggaaaatcaatttttttctcgcctttgggggcggagcggtctgatatcccgtgtccgccttgcttcctactccccatagaaaatggccgggattgtcgtacacaaaatgcatgtgttcgccaatcccggccattttctatgactcgtattcagatgtcggcacactgggatatcagaccgctccgcccccaaaggcgagaaaaaaattggttttccagacactttcttttgtttataccaatcggaaccgccccggcggtttatagatatccaagagactccagatgcagctttaagccttcctcaaggggggtggcgggcagttcaacgcctgcggcctttagtttggataaatcgtaaattctgtggcataagtggccggaatagtcggggtgggcatccaggtaccccgtgagcggcagctcgcggataacggtctccacgcccagaagctttccgagaatctcatagtagatgcggttttccaccgcctccggcccgccgatacagaaaatctgctgaaatgtgccgggtttatccacacactccagcatcacgcgcgccagatcacggacgaagatgggctgggtcacatagatgccgctggctacaagagagagcggctgaccggcgagaatgagatccggcagttccttctggcggctgtgctccggataacagccgatcagaaagccggggccatagatgtgacccgggcgaaacagtgtgacattcagactgcagcgttcttcgccggaaaaacagcgcagaaagacttcctccatttttctcttgtttcctgcatagctgcactccccgggcgtgcctgtctcctccacgaagaagccctcctctgtctgcggcgtccgcttgcgggcgggatcatagacagaatcggttgagatgacaacaagccgtccgcttactttggacagcacttctaaatcctgctctgcgtgacgttcattcatgcagatgcagtcaaaaaccacatcccatgtgactccggctcccaaaaccgcgctgcggaattcctcctcgttgtcccggtccgcgtggagcggtatgatcccttctcccagagggcgttttccccttgtaagggcccatacctcatacgattcctttgccatggaagccagcgcgccgcttaagccgccgcttcctccgataatcagtgctttcattccacttttcctcctgataatgatgtaatttcttcttttttcttccttctttccggcggaaacatgccggagggcgggattcctttcttttccttaaacagcttgctgaagtagaaaatgtcggaaaatccgcattggagagctacttcgctgacgctgtactcaccgcttttcagcatgttttctgcgtaatttaaacggagagagatgagatactgtttgaatgtcatccccatggcctcccgaaagaggcttccataatagacgggatggagatgaaactgttctgccatcctgtcgatggtcagcggttccgcatagtgcaggctcatatagcggatgctgctcttgatccgggggtcttcctggcttaagtgattctcatttaagatcagattcgatatctgatacaggataagacacaggattccgcgtattttcagcatatatccaaaatccttctgcacccattcctcgtgaatttcgtggaagcgtgagatcagccgcggtatgatcccgatgtggctgatgatgggaacgggtaagtatgcctcctggccgaactgattgcgcaggaagatattcgtggagtagcattccattaaatcttccggtatattgacggccgagcggaaggtgttctggggaatgcagatcaaatcccccttttttacaatgtaggtgcggccgccgatgttatattccgcttttccgtcgatgacataggtgatgtcgataaaggggatcacatggggttcaatcttccagtttggcgtgcacttcctgtgaatgtaataatgaagttcaggaatcatattgttaaagtccagattcatataagctccttatcttcctgaaacgcaggatcggggttgtcggttcagtttcattatagaataggcaaaacaaatgcgcaacggagattttaaacagaatttaatctttaataattacaaatggcctttgattccttcattcatttttgttgtgcaacttgttataatgcatttgtaaataaacaatattaaaaaacattttgcataggaaaacggaaatgtgcagttgtaaaaagtacaaaagggaggggagacgatgaccggtgtcgcaataatcggtacaggagtgatttcagaacgccatatagaagcatacgcagcctttcacggccggtgccggattgtggcattatgtgatttcatgcctgagaaggcggagctcttaaaggaaaaataccatttggaggatacggagatttacagcagcttcagggaaatggtaaaacggccggatattcatctggtcagcatctgcacgccgccgtttacacatgcggagagcgctgtatcctgtatgagggcgggaaaacatgtcctggtggaaaagcccatggcctcctctctggaggaatgtgacgagatgatcagagcgcagaaggagacgggctgttatctgggtgtcatctcccagaaccgctatctgcaggataaccggaatttaaagaatatgatcgcctccggagccgtgggacgggttctgtttgggcaggtggagtccctctggttcagaggccgggagtattacgacttatggtggaggggaacgtgggagaaggaaggcggcggctgcacgttaaatcatgcggtgcatcagatcgatctgctgaactggatcatgggaagccccaaaaccgttacggcggtgttaagtaatactgcccacgataacgccgaggtggaagatgtgtctgcggcggttctcacctatgacagcggtgcggtcgtcacagtgacggcctccctcgtgacgcacggggaggggcagaggctggtgtttcagtgcgagagggcggggctttcgtctccgtggcaggtgaagagcagccgttcggaccgtaccggctttccggctgagaaccgggagatcgaagacaggcttctgaaaatccgggaggaacagccgccgcttccctacacggaacatgccggacagattgatacggttctgcgctttttagaaggcggggagacgccgccggagaacagtatggacggacgtctggcactggaggtgatcaccgcggtttaccaggctggatttaccgggagggcggcccaacttcccatattgtccgattcccccttttacacgaaaaaaggatttttggcaaatgtaaagcatttttatgaaaagaaagaggcgcagtcgagtgaaggcgctgtggaggacgaaaaaacatgcacgaactgagagacttctgctggctggcaaaacaagtgcaaaacagaaagatttttacttattatatggaagatatggaaaatacggcgattgcggagacgattgagagagagatgccgctgctgttcggggaagtacggcgctgcgaacggccggaggccgccatcgtcttttcgagaacggctgacgagaagctgggacaggagggataccggatcgaagagacggaaaacggttatgtggtggcgagcgcggccgcttcgggcgccctctacggcatgtacgggctgtaccggcttttgattacggaccgcgccggagaattcccatatgaatcagtaccggaccagagtatccgcatgatcaaccactgggataattttgacggctccatcgagcgtggatacgcgggagaatccatatttttcgacaacaacacatttcggggcgatatggaactgatccgccagtatgccaggctgctggcctcggcagggatcaacgcagtttcgattaacaatgtcaatgtacataagctggaaacattttttgtacagggagatgcgcctgcagagatcagaaagatcgcggatgttctggctgcatacgggattaaaacattcctctccataaactatgcggcgcccatgacggtgggcggattaacgaatgccgacccgcttaatccggaggtcgcagcctggtgggaagagacggtgagacatatctacgaagaaattcctgattttgccggtttcgtggtgaaggcggattcggaaggggagcccggcccgtttacctacgggagagatcacgatgagggcgccaacatgctggcccgggcggtccggccatacggcgggctgattatctggcgctgtttcgtatacgactgtgcccaggactggtggaaccggaaggcggaccgggccagggctgcctacgatattttcaaaaagctggacggacactttgaggacaatgtgattcttcagattaaaaacggaccgattgacttccagatccgggaaccggtatcaccgctcttcggggcgttggaaaagacaaaccagatcctggaatttcagataacgcaggaatacaccggacatcagaaggatgtctgctacctggtaccgatgtggaaggagacgctggattttgatacgaagtatggggatgggctcaccgtgaacgatgcggtgcgaaaccattcgcagatcagaagcagatcggggattgcgggcgtaggcaatgtgggcatggattccaactggacgggaaataagctggcgcaggccaatctctacggcttcggcagactctcgtgggataacggtttatcaccggaggagattgccggggaatgggttcgccagagcttctgtctgacggcagaagaggaagaacgggtgacggcgcttctgtgtacctccagagaggtctatgaagattacacctgtccgctggcagtcgggtttatgtgcaggccaaagattcattacggcgtcgatgtggatggatatgagtatgacagatggggaacgtaccactatgccgaccgggacggcgtgggaagagacagaactgtgaagacgggaaccgcgtatacaagacagtactctgacccgcgatttgcggaatatgaagacctttcgacgtgtcccgatgagcttctgctctttttccaccacgtgccctacacccatgtgctgcagtcgggaaaaacagtgattcagcatatctatgacacccatttccggggggtggagaaggtccttgagtatcaggcgttatgggacagcttaaaggactccctggatgaggagagctacttcaatgtgaaggaacgcctcgcatggcagtatgaaaatgccgtgaactggcgtgaccaggtgaacacgtatttttaccgtaaatcggggatacccgatgagaagggaagaagaatatatcaataaaacaaaaggaaagaggtatcgttatgaaaaaatggagtaaagcaggtatggtatgtgcagcgattctggcagcaggcatggcagtaaccgcatgcggcgggggaaacaccgcgaaaacagataacacgggtgctgtggagacggagaagaaagccgaaggagagccgacggaagcggcaaagccttccggagagacagcaaaattaagcttttcctggtggggcaatgacgaccgccatcaggcgacacagaacgccatcgacgcctttaacgcggctcatgcgggagcgattgaggtgaccggtgaaccctctggcttcggtaatctggaggagaccttcgcaacccgctatgcagggggaaccgcggcggatgtcatgaccgtaaactatccgtgggtcatccagtacagccccaatggggagggattttacgatctcgaccaggtaaaggatatctttgacttcagtcagtatgacgagggattcttagaattcggcaagaccggaggcaagatgcaggcggttccgtacggtcagaacacgctgggcttatacgtcaacaaatccgcctttgacagagccggtattacagaactgccaaagacgtttgaggagtataaggaggctgccaaaatctttacacagcaggatccgaatacttacatgatcgtcagcccgaccttccgctttgctgcggtttactatctgcagcagaagaccggaaaaggagaatttgcggaagatttaagcatgaattacacggttgatgactataaggaagcacttctctggtataaagatctggcggatgcccatgtattctgttccagaaaagactacattgagaatgtcggcaatgagccggtatcgattgcacagaatgcaaagtacattaacggcggatacgtgggagtcctggaatggaccggcggaatcgcctccaacgcgaagaccctggaagacaagggcgatgagctggtagtggctccgcttcctgtcatcgaaggcgcggcattcgagggaaccatggcaaaaccgtcactgctcttcgcaatctcaaaggacacaaagaatccgaaagaggcggctgaatttttacagtacatcttaaatgacccggaagggacgaagctgatgggatcgacacgcggtatggtggcttccagggcggcaaaggcttccttagaggcagacggacagattgaaggggccgtaaagcaggcgtacgatttcaccgacgaagcaaaggtcattaacaattccccgatttttgaaaacgcagtatttaccaattcctatgaaagcaattacgagaaatttgagtttggaaagagtacggcggaggaagccgcacaggccatcttcgacgctaccagcgaacaggttgcaaaactgaaacaggattacggaaagtaagaaattccatgtgactggcttatccggcagaagagtaccgctcttttgccggaaccgttagaaagaaggaggaaattcgttgaagaagagtaaaatgggactcgtatatatccttccatggctgatcggtatggtctttctcacattatatccgtttatcaatgcattaattatcagttttacggattataatctggttagggatcctaattttatcgggctggccaactatacgaagttattcaaggatgaagattttttgggcacgctcacggcgacgctgaaatacaccgtcattacggtgccgctgcagctggcgtttgccctgtttattgcatatattctgaattttaagctgaagggcatcaattttttccggacggcctactatattccgtccctgctggggggaaatgtggcagttgcggtgctgtggagatttttgttccagcaggatggactgatcaaccgcattatcggcgttgtgggaatccagccggtggcatggctctcgtcgccgggcggcgccatgagcgttatcatcatcttaaaggtctggcagttcggttcagccatgctgatctttctggcagcgttaaaggatgttccgcaggacctctacgaagcggccagcgtagatggctccacgaagctgcactcgtttattcatatcaccatgccgttaatcacacctactattttcttcaatctggtcatgcagctggtcaatgcgttccaggagtttaacggaccgtacctcgttacgggaaagggccctctgaatgcaacctatctgacttccatgtatatttatgacaacgcgtttaagtatttcaacatgggatatgccagtgcggccagctggatcctgttcctcatcatcgtggctgtgaccctgattctctttgcaacacaggacaagtgggtctattattcggacggaggtaattagaagatggagaatacgcgtggatacagcgaagtggaaatccggaggcgcaggcgcttaatggtcagtgccgcagtccgctatatcgttctgattgtcgtggcgctggtcatgatctatccgattatatggctggtgggcgccacctttaagagcaacaatgagatttttacttcgatcagttttattccgaaacggatcgattttaccccctacatagaaggctggaagacgaggacgaagtataccttcaccacatttttcttaaataccttcaagtttgtaattccgaaaatcgttttctgtctcgtctccagtacgcttgtggcgtatggatttgcaagatttgaatttccatttaaaaagatctgcttctcccttctgatggcgaccatgtttctgccggccgttgtgacgagaattccgctctatattttgtggaagcagatggggcttttgaatacgtatgtgccgttgattgccccgacaatctttgccaatgaaccatttttcgtgttcatgctgatccagttcatgcggtcgattcccacgtatctcgatgaggccgccaccattgacggctgtaattccttccagatactgatgaaggttcttctgccgtcgctgaaaccggcactgatcagctgtacgatctttcagtttgtatggagttttaatgacttcctggggccgctcatttatgtgaccagcctggaaaagtatccggtggcgctggctcttaaaatgtccatcgaccagagcagcggtatcgtggaatggaatcagatccttgccatgtcattcctggctctgcttccggctctgatcctgttcttctccgcgcagaaatattttgtggagggcgtgacttcgaccggcgtgaaaggatgatgtgtatggaaggtgagatgcagctctctgtgacgccttttctttcaaatcacgcggtgctccagagagacgaagaaatcgtggtgcgcggcagaggccgctcagggtgtgagatttttgcagagcttaagggaccggcaaagaagcggctggaacgccggggggtggctggagacggcggaacctggcgcctggtatttccgccgcttccggccggagggccgtatgaactgcgggtgaagtccggtggcgaggctctggaatttacggatatctttatcggagatgtctggcttctggctggccagtccaatatgcagcttccaatggagcgggtaaaataccggtacccagaggaataccgcgagggggcatcgcctctgatccgtcagtttgcagtcccgatctgctggaattttgactccgcccaggccgaattgtccggcggagagtggaagacggccgcagcggaatatactccggtattttccgccgtcggctttttctttgcaaaaaagctgtatgaacggtacaacgttcctgtcggtctcgttctgactgctgtgggagggacgccggttcaggcatggatgagccgtgaggcgctccgggagttcccggatgaactggagaaggcggaggcgttaagagtccccggccttgtgaagcggatacagagagcggatgaagaaaggattgccgcgtggtggaggcttctcgatgaaaaggacccggggattttggaaaactgggccgccggaggtgatgaaggatccggaaatgctttgtggaagaaaacgaatcttaccgacagctgggagggaaacgacgagctgagcggcaccggaaccgtctggcttcggaagcatgtgaatatcccgcacagccgggcgggaaaaccggtgcgcatctctctgggaacggttacggatgccgatgttttctatgtaaatggtattatgtccggatccgtctcctaccggtatccgccgagagagtatgagcttccgggtctgaatgcgggagataatttacttgtgctgcgggtagcggcggtgcacggacagggcggtttcacccgtgggaagaaacaccggattatctgggaagacgggatggaaagtgatatatcaggcggatgggaataccgccggggcgcggtgatggagcacctggaggaacagacgtttttcgaacgtatgcccctgggaatgtatcaggcgatgaccgctccgctccatgatttcccgatcaggggaatctgctggtatcagggtgaaatgaatgcggatgagcccggagcctatccgggatatttttcgcggcttacggcggactggagggaaaaatggaaaaattcccgtctaccggtgctctttgtgcagctgccgtgctatgatctgtacgatgccggacactgggtggaattccgggaaatgcagcgcggcctgaccgcgattcccgatacggccatggtcgtcacaacagactgcggggaagtgaatgatctgcatccggtgagtaaaaaaccggttggagagcggctggccatggcggcgtttcaactggcgtacggggaatgcgggacgtggctgagcccggtgttttcatttggtgagacagaggagagaggcattgtgctgcattttgaacatgcagacgatggtctggagactgttgacggagagatgctgtgcggctttgaatacgggttttgcggggagagtccggaatgctccggcgtgatctgccgcagaataccggcggaagccgcgctggaaggcaaccgggtgagagcggcgctgccggagtctggcgggcggagaccggatgtcctgctgtacgcatggtccaatcaaccggaggggaatttatgtaattcccaaaagctgcctgcgtcgccgtttcggtacctgataaaagagaagggctgagagggccggaagttttaacagaaaaaggccatcggacggtttacatcagtcaccgctgcgatggcctttcaaaaaaataatgcgggagatgggacttgaacccacacgagcatacacccacaagatccttagtcttgcctgtctgccaattccagcactcccgcacaacgaagattatgataccatttttatagagaattgtcaatattttttcaaaaatatacacaaaaaaatattttctaaaatttgtaaaaatgtgattgacaggacgccccttttataatataataactactgttgctgcgagagattgcagagacatgcagaagtggcggaattggcagacgcgcacggttcaggtccgtgtggtagcaataccgtgagggttcaagtcccttcttctgcatcaggagcccctgcagataatttgtctgcagggttttttctatgatgcgaggacgatgttcctccgatgtcaaaaagctgttcggacaggagcgtcctgcggcagctaaaaattaaaataaaaatgataaaacatattgacattttctccatttattggtattataatctagctgtgcgggagtgctggaattggcagacaggcaagactaaggatcttgtgggtgtatgctcgtgtgggttcaagtcccatctcccgcatgaatgggcgaaagctccggatgaggattttgtgaaaggtgaagaccttttatgaagtccttttttcgatttaccggtattgcagacggtaaagccgtttgtttgctggagtctgtgaacagcagcgtctgtctgccgtagagaaaggacagcaatatggacaaggggaagaaaaacggatcatccagagaccggatacgcaggacatggatttcactgcctctgcgcaaaaaggcaggtaccattaccgtacttgccgcttttgctgtgtcctgttcgattctgatgaaccttgtgaccgccggatttggtatgaacgggttccggcagattctggaggacaactcccgaagcgcttcctttcatgcggcgatggaaacagagagccggacctttaagacgatgatccggaaccgctcggaggagaacagggccgcgtacgaagcagcatgcaatgcggcgcgaaaggctctggaagctctgccgtatgattacgatgagacagggccggaacgtttcgcaaagacgtggtccgtgagaaacagctatgatacgtacgagaagaggaaggcggtactgctttcgatggatgaggatgatcctgaattcgttcataagctgtatgagatctactagatacagaattatatcaaaagctatgccgggagccttcaggagatgaatgtggctgcgggagtccgcagatatgaaaagcagattccgctgtttctcctgattccggcactgacgattctctggggagcgctggcactggccacggtcgtttggctgaaccggtcggttggaagatacattgtcaaaccggtgcaggcgctggccgaggattccaggcggattgcggaaaatgactacagcggcccttccgttttgccggaaggggaggatgagattgcggatctcgtccgagcattctgccggatgaagctttccacacagggttacattgaggcgctgaaggagaagcacgaggcagagaagcagctggaggcagtgcggcttcagatgctgaagaatcagatcaatccccatttcctgtttaatacgttaaataccattgcaggagccgcagagatggaggaggcggagacaactgagaagatgatacaggccatgagcagactgttccgctataacctgaaatctacggcctcggtgatgccttttgagcgggagaagaaggtggtggaggattatatctaccttcagaagatgcggttcggcagccggatccggtatacctcggactgcagccaggatactatggatgtcatgattccggtatttgccttacagccgctggtggagaacgccattgtccacgggcttgcagtaaagccggaaggcggacggctccatatccggtcatggataaaagaacatcggatttttatatccgtgtccgacacgggagccgggattgcgccggagcggcttgaggaaatcagggcagaactgaagcgtggtgagagccagaaactgggaatcggagtcagcaatatcagcaggcggcttaagaccatgtatcctgacggggagctggtgatcgacagcagagaggggcggggaaccgttgtccgcatggcctttaccgcttcggagatattctgatgagggaatatggaacatacagagatacagaccagaaaacagaggggaaagcggggagcgaatcatgtaccgggtcttaattgcagatgatgaagagattgagaggctgtccttcagccggaaacttaaaaagtactttggagaaagctgcgaggtcttccaggcggagaacggcatgcaggcgattctgtcggtggataaaaacgacacgcccatcgtaattatggacattggaatgcctgggatgaacggtgtgaaggcggcggaatggatcagaaaaagccatccggactgcgttatcatatttttaacagcctacgacgatttttcctatgcaaaacgtgcggtttccctccatgcgctggaatatctcttaaagccctgtgacgatgaggagctgattccggtaatggaggaagccatgcgtcaggtggacctgtgcaggggaaggagagcttctcaggcggcagggcgaagcggcggcagaagcgaggacgggacagaaggagcgcctggccaggcgggagagcgtggcgccggaaccggccgggaaagggatactgaccctgaagaggcggcggagaacggatattccagagttgccgtagccattcgcgcctatgtcagggagaattacagccgtgatatttccatgcaggatgcagcgcgggccatgaactattcagaggtatatttctgccgtctgtttaagcagtgcttcgatcagaattttaccgcatatctcacccgcttgagggtgaaagaggcaaaaaaactgctggaggacccgcgggctaatattaaggacgtgagcagaagcgtgggttacagcgattccaaatatttctccaaaattttcaaacggattacaggtcagctgccgtcggaataccgggacggcctgccgccggcaaaataacatgaaattcctgatgctggaaaagtgggtaatattaccctcctgaatgtcaatattttactgtacacatttcatctccatggctttataatgatgttactgttaagaaggggccaagatcttaacgatatcgtaacacaaaaacagccatggggatttttttgttctgcgcagaaaccggatcttacaggctgtttttgctgccgggaagtattccggccgtttcgaagtatatacataccctggaacggggataaatagtatgtgagtctatgtaatgtatgaaaggaatggagagcgttgaaaaaaatgatgaaaagagcagccgctgtattgctggccgcggccatggcggtttcgctgaccgcgtgtggttccctcactgacggaaaacggattatccgtatttcccatgcccagtcggaaactcatccggaacatttggggcttctggcatttaaggaatatgtggaagaacgtctgggggataagtacgaggtacagatatttcctaatgaaatcctcggttccgctcagaaagcgattgagctgacacagacgggagcgattgatttcgttgtggcgggaactgccaatttagagacgtttgcggatgtctatgagattttcagtatgccgtatctgtttgattcggaagatgtttataaaacggtgatggaagattccgactatatggaacaggtatacgagtccaccgatgaagcgggcttccgggtcgtgacctggtataacgcgggaacgagaaatttctatgcaaagacaccaatccgtacgccggaagacttgaaaggtaaaaaaatcagagtccagcagagcccggccagtgtttccatggtgaactcttttggcgcggcggcggcccccatgggcttcggtgaagtttataccgcgattcagcagggcgtgattgacggcgcggagaacaacgagctggcattaacgaacaacaagcatggtgaggttgcgaagtattacagctacaacaagcatcagatggtgcctgacatgctggttgccaacttaaagtttttggagggactgagtccggaagaatatcaggtctttaaggatgcggccgcgctttctacggaagtggagatgaaggaatgggacaagagcatcgaggaggcgaaaaagattgcctcagaggacatgggagtggaattcatcgatgtggacgtggatgccttcaaggaaaaagtgctcccgctgcatgagaagatgctgaatgacaatccgaaaatccgcagcttttatgaatatattcagacggtcaatgaacaggcgaagggggaggaataagaatggaaacactgcataaaatcagagaagtcctgatgaagattctgggactgttcattattttcctgtttgccatgatgacggtcatcggaacgtatcagattgttacgagatactttttcaacaggccgagtaccatatcggaggagctgctgacctatacctttacctggatggcacttctggcatccgcttacgtatttggaaaacgcgaccatatgaggatgggcttcctggctgataagataacgggaacggccagaaaaattctggaggtggcgatcgatttcctgacctttgcctttgcggcggtggtgatggtgtatggaggaatctccatcgtaaagctgaccatgattcagacgacggcttcccttcagattcccatgggatacgtttacttaatcgtaccggtaacgggaattttgattatgtatttcagctttacgaatggcatggacatgctgcacggagatttcagtgagaagggagaggcgagagtatgaatacaatagcgatagcgtgcggactgattattctggtccttctggtgattatgctccttgcaggcgtgccgatcgcggtcgccctggcggtttcttccatctgtgccatactgcctattttaaatacaggagcggcagtccttacaggagcacagcgtattttttcgggaatttcggtgttcagccttcttgccattccgttttttatcctggccggaaacattatgaacaaaggcggtatcgccatccgtctcattaattttgcaaaactgtttaccggaagaattccgggagcactggctcacaccaacgcggtagccaacatgctgtttggagcgatttccggctccggtactgcggcggcctccgccatgggttccatcatcgggccgatcgaggaggaagagggatacgaccgtgatttctcagcggcggccaatattgcgacggcgccaaccggacttttgatccctccgagcaacgtgatgattaccttctccttagtcagcggaggaacctctgttgcggcgctctttatggcgggttatattcccggaatcctctggggacttgcctgtatgctggtgatcttcttttttgcgaaaaagcgcggctaccgcagtacgaagcggtattccgccagcgaaaaggtgaaggtgtttttccaggcgattccctgtctgctgatgattattatcgtaatcggaggaatcatctccgggatctttacggcgacggaggggagtgtggtggcagttgtatacagcctgattctgtccctgttcttctatcggtcaattaagcttacggaactgccgaagattttcctggacagtgcggagatgacgggaattattattttcctgattggcgtttccagcattatgagctgggttatggcatttaccggtattccgtctgcagtatcggaagccatgctgagcatcagcaataaccgttatgtcattctctttatcatcaatattcttcttctggtcatcggtacattcatggacatgacgccggcatgtctgatctttacgccgatcttcctgcccatctgccagaagctgggaatgaataccgtccacttcggcatcatgatgatctttaacctgtgtatcggaaccatcacgcctccggtaggcacgacgctgtttgtaggtgtaaaggtaggtaagacgaaaattgaaaatgtcatcaagccgcttctcctttactttacggctatttttatcgtcctcctgctggtcagctacgtaccgatcctgtcgctgtggctgccgggattactggggtatgtataaggaaaataaattatttttgaaaaattgaaaaaagtacttgattaatttggataaatatagtaatataattgtatgaattggacaaccaattcgtacaattatatgctgtatggcaatgcagaagtggcggaattggcagacgcgcacggttcaggtccgtgtggtagcaataccgtgagggttcaagtcccttcttctgcacgaaagaaacagagaacaggagcggcggtatccttcgtgataccgccgctcctgttctctgtttcttgtttctttgagggagtctgtcactccacatccttcgacatgctcataccgggttcatacacggcgtactggttgcgcccgtgcagcttggcgtgatacagtgcgatatcggccttctcatagagcgcctcgaaggtagtcccgtcctccgggaaggccgcggtgccgatgcttccggatatatgtgcctccggctccagggcgctgccgatcaggctgcagagattctccagccgggcatataggtccatggagtaggagacgtctttcagcagtatgatgaattcgtctccgccgaggcggccgaagatgtcatcacggcggagcgctgattttaagcgcgcggccgcagtgcggagcgctttgtctccaaactggtggccgtaccggtcgttgatctgtttaaaccggtcgatgtccagcataatcagaatatggtgatcctggctgttctttaaaatatggcggatggcgcggaccgaggtaccgcggtttaacaggccggttaaggaatcctgttccgacatttcctgaagcgtcaaagcctcctttttctcttcatcgatgtccttgatgaggataaacgccttgatggtgtcggtatacgggtcggggacgatctggatcagtcccaggcaccagtaggtggtgccgtcggggcggagccttctgtgttccgtctgaagggagcggttgccgtggtaataatggtagaggagctggttgcggttaaatacctttaggtagttttcgcggtcctcttcatatatgaagtgttccgcgatgtaattgatgatgtctgagaaggtgttccgggcgtattccggaagggtggaggtgagttctcccatgatctcctcaaacagatcgtatttgagattgtattcgtaatagccgatacagtcttttttttgctcgttcatgtactccatccatttttgataggcaagttctttttcatactgtccggtaatatcctgataggagatgatgcttctcaacggttcccggttctgtccgcggataagagagtagcaggcggagaaccagtggtattctccgcttttcatcttcatgcggatgatcgatttcccttccgggacgcccctttccatagaatcataaaagtccagaaaatcctggacgctctcccggtgaatgataccgttatcgatgatgaaatcaggggttggcggacatgaaatgggactgggaaaggaaaatgcggaatcgtgcggctgacagagcgttttcgaaggaatgtcgtagatactgatgttgcatccggagtgccggctggcgaggcggtattgctcttctcggatgagtaactcttcctgccgtttctttctgtcgtttatatcaatcaggatgccgtacagcacttcttccccgcctccggggacgtaattgatgcggatgaggtaccagcagaagtctcctccctctgttggacttcgaaactcaagctcaaaacgtgcgggcgcatcacccagatgccccagaatatcctgttccagttcctgataatccggcggttccacgatgtcttccaggcgttttgcggctccgtgcagctgcttaaattcatcgttggcatagaggacaggaaagccgctttcggccttcagctttacgataccgcagggtatgttgtcaagtatcatatcggatttcatatacatttctcccttatgtgtgttttcttatgaatggtaaaacggatattgttataattgtatgaagaggaggcgggaaaaagaaccgatatgaaaaaaaatatagtaaagattggaaaaatggtgtatactagcatgtgcgggtgtttgagtaagagatacaggaggagacatatgcttacattagaaaacctatcttttggcgtacaggatgagaagagccagaaagagattatcaggaatttaaacctgaccatagagagcaataaatttgtcgtcgtcaccggccccaacgggggcggaaaatcgactctggcgaagctgattgcgggaattgagaagccgaccggcgggagaattcagctggacggggtggatattacagagaaaaacattacggagcgcgctcagagcggaatcagctatgcattccagcagccggtccgttttaaagggattgaagtattcgatctgctgcgccttgcgtcgggaaagcagcttaccattacggatgcatgccagtatttatccgaagtaggtttatgtgccaaggattatatcaaacgcgaagtcaatgacagcttatcgggcggcgaactgaagcggatcgagatcgctaccgtgctggcgcgcggcacaaagctttctatatttgacgagccggaggccggaatcgatttatggagcttccagaatctgattgcggtattcgagcgtatgcgccacaacatcaaaaacggttcgatattaatcatctctcatcaggagagaattctggatattgcagacgagatcgtggtcattgcaaacggtcagatcagcatgcagggcccgaaggatgatatccttcctcatcttctggggacagcttccgcagtggatgcctgtacgaagttctacaacaaggaggaggcatgacatggcaaagatggatgagattcagaagcggctgttagaggaagtcgctgatttacatgacgtgccggaaggcgcatataatctccgcgccaacggccagacagcgggccggaatacgacggccaacatcgatatcacatcgaaggacgacggcaccggcatcgatattcatattaagccgggtacgaagcatgagagcgttcatatcccggttgtgttaagcgagagcggcttaaccgaggtggtttataacgatttttatattggagacgacgcagatgtggtgatcgtcgcgggctgcggcatcagtaactgcgggcagcaggattcccggcacgacggaatccaccgtttttacttaggaaagaattccaaagtgaaatacgtggagaaacactacggcgagggcgatggaaacggtaagagaatcatgaatccgggcaccgaagtgtatctggaggaaaacagctacatggagatggagatggttcagatcaagggcgtggattccaccaaccggaacacgaaggccgagctttcagccggtgcgaagctggttatccaggagagactgatgacacacggcgctcaggaggcggtgagcggatttgtggtgaatttaaacggtgatgactccagcgccaatgtgatttcccgtgcggtggcgagagatgattcgagacagacgtttcttgcggagatcaacggcaattccagatgtgcgggtcactctgaatgtgatgcgatcatcatggatcacgccaatatcagcgcaattccgaagatcacggcaaacaacacggatgcagccctgattcatgaggcggccatcggaaaaatagcgggagaccagattatcaagctgatgacgctgggactcagcgaggcggaagcggaaacgcagattgtgaatgggtttttgaaataaggagcatgataatcagtcaggatgtgctatttatgaaaagaaaaaaatttttcttgatcttatcagtcgttctgatactatattttttaatcgcattaatctgtgattacagggcatttaatcatggggattaccctcaaatgtatttatacaaacaggcagaatggtacccagccttagtacatcgtgctggaggcgaagaatatattgagggacagtattcctaccatggctggtgttatacaatagaaatgaaggtatataaaaacatgcagaccaaacaggtttacaatttcttttccggatgtggaactgcagtgagttaccggatctttggaaaaaccttaacaaggcatttttataatggtgtctccattcctttgtcgaacttgtcagaaatgcatgagtaaaattaatactgcttaaaaaatgcgcttcaatccctttaatcgaaaggaattgaagcgcatttgcctttatttttgaaccaggctcttacgataaagataaaccggccgtcccgattccgtcttcctctgcacctctccctgaatcagaggaagcgcataatcgaggaaggcctgtgtcacatcggtgccgcgggaattcatccactcagaggggaagagtttttccctgttgcagacctcatttacatcaaccgtaccgcattctaaatggtacggtccgttttcgtttcgcaggaaagagatcatgcgcccggtcagcccggagacagcagcctttacgccttcacggcctgcaagaacggattcttcaatatcagtggcggaagccatcataccggagcaacgctgattgacgtttaattcgatggaacggaccttgacgccgaatttatcgcgtatgaagttttccagcatcttaccgctgccggtcagcatcttgtggccgaaggtatcgagacgggcagcatccgcatattcacagataaatttgcctctggcatccgagatgccttccgagatacagatgacgacggtgctgttcttcgacagggcggcagtcacatcctctgtgaactgttcaaaatcgaaatgggtctccggcagatagatgagtaccgggttgtccccctcgtatttacgggcgagagcactggcagccgttacccagccggcgtggcggcccatcagctctacgatggtgacggatttctgctgatagacggaggagtccagaacgatttcccggaccgtatcggctacatattttgcagcgcttccgtagccgggggtatggtcggtgagaacgaggtcgttatctatggttttcggaacaccgatgaaccggatctcgctgtggtggtgggaggcgtagcgggacagcttgctgacggtgtccatggaatcgttgcctccgatatagaagaagtatccgatgttcatcttccgaaacttctcaaacagagccggatagaatggtgaggataagtcttccggcagtttataacggcaggaacctaaataggccgccggtgttaattttaaaagctctaattcatctgaagttaaatccgcggttaaatccatacaggtaccggacatataaccttcaattccgttaatcatgccgtagacgtgatcaatggcttcctggtttatcccttcctttatgacgccgtagaggctcgcgttgatgacggcggttgggccgccggactggccaacgattgcatttttcttcatgtgtatattctccttttttgacgctccccctattctataatagaaacgcaggctttgcaacccctgcttttcgtgatcgcgcaaggttagacaaattttcacactctcagccatacctattttttgtgaaaattctataattgagatagaacgtaagcgactagaggaggatgatgggatgcagtacggacattttgataatgaaaaaagggagtatgtgatcgaccgggtagatctgcccacgtcgtggaccaattacctgggagtaaaggatatgtgcgccgttgtgaaccacacggcaggcggatatctcttctacaaatccccggaataccacagaattacgaggtttcgggggaatgccgtcccgatggaccggccgggccattacgtctatgtgagagatgatgagacgggggaattctggagtatatcgtggcagccggtgggaaaacctctcgatcaggcaaaatacacctgccgccatagcctgtcctacacgacatacagctgtgattaccagggaatcgaagcggagcagacgctgttcattccgattgacgatcctgtagaactgtgggatgtgaagctgaaaaatgagagcgggagaaaacggaaattaagcgtgtattcttactgtgagctttccttccaccatatagagatggataataaaaactttcagatgagtctgtatgccgccggttcttcctttgaagacggcattattgagcacgatttattctatgaggagtttggataccagtactttacatcagattttaaaccggacggctacgattgcctccgggacaaattcatcggcctctaccacacagaggataatcctgtggcggtagaacggggggagatgagcggaagctctgagaaaggcggaaatcactgcggcgcattgatgagacgtctggagctggagccggaagaggagacgaggcttatattcctgcttggcgaggggaaacgggaagcaggacgcgctatgcgggcgaagtactcggatcacggagcggtcgaccgggcgtacagcgatttaagggcgttctgggacgataaatgcagccgccttcagatccaaaccccggatgaaggcatgaacacactgatcaatacgtggacactgtaccaggcggagatcaacgttatgttctcccggtttgcctcctttatcgaggtcggcggccggaccggtctgggataccgggatacggcgcaggatgccatgacggttcctcactctaatccggaaaaatgccgccagaggctggtagaactgcttcgcggtctcgtatcggccggatacggtctccatctgtttcagccggaatggtttgacccggatacggaggtgaagcctttcaagtcacctacggtcgtgccgactccgaaagtttctgatatgatccacggtctggaggatacctgctctgacgacgctctgtggctgatcgcctccatcgtggagtatgtgaaggagaccggggaatacggattctttgatgaaatcattacgtatgccgacggcggaagcggtacggtgtatgaacatatgaagaagatcctggatttctccgcaaaacagatcggagcgcacggcgtctgcaaggggctccgggcagactggaacgactgtctgaatctgggaggcggagagagcgcactcgtatccttcctccactactgggcgatcgataatttcctggaagcggcatcgtggctgggaagagaggaggacgtgaaggtttataccgacatgctccgcacggtgaaagagacctgcgacagagaactgtgggatgacggctggtatatccgcggcatcacaaaaaatggaagaaagatcggcactcaccaggaccgcgagggcaggctgcatctggagtccaacagctgggcggtgctgtccggcgctgcagattatgaaaaggggataaaagccatggatgccgtggacgaatatctgtacaccccctacggcattatgctgaacggcccttcctatacggttccggatgatgatattggctttgtcaccagagtttatccgggcgtcaaagaaaacggatccattttcagccatcccaatccatgggcgtgggctgcggaatgcagactgggaagaggcgaccgggccatgaaattctaccatgcattgtgtccttactatcagaatgatataatagagatcagggaggcggagccgtattcctactgtcagtttattatgggaaaggaccatacggcttacggccgggcacgccacccgtttatgactggaagcggcggctgggcgtatttttcagccacccgctacatgctggggattcgcccgcagtttgacagcctggagattgatccgtgcattccggcggactggaaggagttctctgtaactcgcgtatggcgcggcgcagagtaccgtatctccgtgaagaatccggaaggcgtaatgaagggcgttaaggaactgatactggatggcaggaaggtaagtaagatacctgtgtcagaagcaggaagcagtcatgaagttactgttgtcatgggagataaaggaggagaatcatgattaaatttggcaccggcggctggagagccgtcatcggcgatgagtttacgagggagaatatccagaagctgtccagggctctcgtcaataaaatgaaggatgagggggtagcggagcaggggatcgctatcggctatgacaggagattcttatcaaaggaagccgcgatctgggcaagtgaagtgtttgcggcagagggtgttccagtgaagttcattcttggttccgcccccactccgctcatcatgttctttgtcatgcgccatgagatgccttacggcatgatgattacagccagccataatcccgcggtctataacggaatcaaggtgtttacaaagggaggccgcgacgcggatgaacttcagacacaggagattgaacggtatattcatggaatcgaggaggaagtgcttaaagcggcctgcgtaacccggggttctgattcggaggagccggcggttcgcgtgatggagtatgagaaaggcatcgagaccggaatcatcgaggagatcaatcctttaaatgaatatctggataatattatcagtgccgtcaatatgcaggcgatccgggaccgcggtttgaggattgccattgatcccatgtacggggtcagcaatacatcgcttcggaccattttggcgactgcccgctgtgacgttcaggtgatccatgaagaacacgacacactgttcggcggaaaactgccggcgccgtcagcctttaccttaagaagtctccagaattacgtggtggaccgcaagtgcgacatcggtatcgctaccgacggagacgccgaccgtgtgggcgtgatcgacgatacgggcaaattcctccatcccaacgacattctggtaatgctttattactatctcgtcaagtacaaaggctggaagggcgcggtagtccgcaacgtggcgactacccacatgcttgacaaggttgcggaaggctttggagagaagtgctacgaagtgccggttggcttcaaatatatctctgcgaagatgaatgagacgaatgccatcatcggcggcgagtcctctggcggactgacggtgcgcggtcatatcaacggcaaagatggcatttacgcctccacgcttctggtggagatgatcgccgttaccggcaagaagctgtcccagattgccagggatattgaggacgagtacggcgcaatccatatggaggagcgggattacaagttcagccaggagaagaaggatcagatctatgacacccttttaatccagaaacagcttcctgagatggatctggagatcgacaagatatcctatctggatggctgcaaggtgtactttaagaacggcggctggattatcgcaagattttccggaacagaaccgcttttgaggattttctgtgagatgggagatccgaaggatgcgatcaggatgtgcgagtgttttgaagagtttttaaatattaaaggaaacagaaactaaatcatttgattccggagctcaggccggcgtttgggctccggcagcagcaattgactggtaatcggataacggagggcagaactgaatggttcagtttgccctccgttttttgactgacagcggtttgcctcatccgttctgcagcagcgtcatcgctctcaatttttcttcatcctggataaccagacagccgtcttcccgggctataattcccgtctccctcagcttcctggcaatgcggcttacggttaccggatgcatgcccagatagttggcgacctcaacaaaagaaaatgccttgggaatcatggatttcccgcgtttcttaatgctgtaggtcaggagccacttacagaactgtgcggttttgtcgccgtccatcatccactggattttattgaccagttccagataatttaaagtggttgcgcctaacacgcactgggtgaaatacggggaagaatccatcatggattcaaactgtttttcccgcatgctgtaatagacacaatttgtttttgccgtgatccagaacggggaaggggtgatatagcgctgccagtcataaggaaagtgtttcaccagtgcattggcaaagccaaccagccgcttttccccaaaatagaggtaaacatgctcctctccatcatcattgatccgtgtcagagccgcgatcccctcatccagaaaacagatattatcgcagccctcacgcgatggatcaaacagatattgattctttttcgcctctctgcgaattccgcagcgaataaaatcttctctgatctgatatggttccatggtcatcctcccgtataaatctttttttactgatataactatagcacaccttttccctggtatccactgaaaaatgcattttgtatcttagcacctgctatggtatgtgtgatatcagtatgttaatattgtaacaataaaatagattagggggaaataccatgaaacaaaagaaaaatatgtatccgtttcactgcatgatcggcatcgcaattatgctcctgtttcgcctgctgccgattcacatgcccaatatcacaccagtaggtaaacagatcttcggcattttcatcggaacgctctatctgtggacgacagtcgacccggtctggtccagcattctctgtatctttatgatcggcacctccggttatgcaccgatgggagccgtgctgaatactgcgttcggcaatcccacggttgttcagctgttctttctgatgatcctgatgaacagtctgcagacgaaccggatcagcgcctatatcggccgtttcttcctgacgagaaaatttattatcggccgtccgtgggcatttactgccatactctttatcggatccatgctgatcgccgcgtttgtgggctgctttgcgccgatattcctgttctggccaattctttacgatatttttgaggatatcggtatgaagccgttcgaggcatatcctaccattatgctcatcctgattgttgtggcctgtgccatcggattcccggttccgccatacatgagcaacggtctcgcactgatttccaactacacaaccgtgtctcagaaccttctgggaacaaccgtagtgatcaacaacggacagtggctgctcgtcgcgttgatttacggcttcttatgcagcggagctgtgattctctttaccaaatatgtcctgcatcccgacgtgagcaggttaaagaatctgacgctggaacagctgaataaaaatccgctgcctccgctgagcaaaagacagaaggcagtggcgctgatctgcgtctgtttcctgttaagcatgcttctgccaagccttttccccacacttccgggcatggcatggctcagcgccaactccttcgggatggctcttttattcctggtgatcttatttgcagtgaaaattgatggaacaccggctattacaattgaagagaatatcggggtatttgcctggggaacctttttcctggtgacctccgcaatcctgctgggaggcgtgctgacgaatgaaagcacgggagtgaccgcatttttaaataccatcctttccccgattttcaccggtatgagcccgcttgtcttcggcgccatgcttctgatcatcggctgtgtgctgacgaatgtctgcaattccctggtgatcggcatgatccttcagccggtggtggcaacctactgcctgcaggccgggattaattccgcccctctggtttccattatgggaatctttgtgctctcgtgtgccattgcgactccggcggcatctccgtttgcagccatgctgttcagcaataagaactggataaaatccagagatatttaccgctataacatcatgtacgtggtattggaactggtactggcgcttctggtggggctgccccttgccaatgctctgattcattaaagaaaagatgcgggcgctatagctttccctgacgctttatcgtataatgaaagaaatacaatttgcaggagggatctgtatgaaaaagcattgcaaaaaattagcggtttatttaattagcggcagccttctggtgtccacctttaccgtgatacccggaaccccgttttccatcgaggcggaggcgcactccgggcgtacggatgccaatggaggccacaaagacaaccagaataagagcggcctgggaagttaccattaccattgcggcggctatccggcgcatctgcacccgaacggcgtatgcccttatcagtcaggagctgcctcagaggacaggcagaccacacaacagacggaacagaagccggcagtacagccggaaacgaaagcagagactcagccggagacccaggcgactgccattggctggcatcaggatgcgagcggctggtactactgcaaaggggacaaccagtattataaagacggctggcaggagctcgacagcaagtggtattactttgacgtcaacggctatatgaaaacaggctggctgatactgggagacgactggtattatctggcgtctgacggccacatggtgaccggagatatggaaatcgacgggactctgtactatttcgagacgaacggggttctggttgacgattattatgactgatggggataggaccggatatgcttcctgtaaagtgaattcatatttcacacatttttcacatgctgtacaaaatttatttacatcttctacaaacttacttcataagtcttccgtatactataaccatagacaagaaaaacttgtttaataaaaagactttttttcataactcgccggtggaacccacattccaccggctcctccctttttatggggattttttgttttaacctgtctgactgcatgattttttgctcttcatgtaaattccatatttagaatagaagtgaactttaaaaataatatattttatatttgaaaaatatctaaaaaacagccgctatttttgtaactatcagacaaaaatagaatggctttttttgccttttagacattgacgatatcaatcaatctttctataatgacaatatcaattgattctacatttaaaaactatattccatatatgaaaaaaaggaggagccatggaccttcaggaacaaatgaaagagtatagtgctttgaaagcacttcagattattctggctttagcagagcagaaaggctgggtgaatttaagtgatatagcggaggcaaccggtttgagcccgagtacggttcatcggattttgcaggaacttcaggcatgcggttttgtttcaaaaaacaaagaggcgaggcagtataaactggggatgggtatgatgaatattgccctgaaagtaaacatgtcggattatttgctggaagcagcgcaggaggagatgacccggctgaatgagttatcgctggagaccattcatctgattgcgccggataatgataaggcggtatacataggaaagatggatgcaaaaaatcaaattcagctgagatccaggattggctggaaaatcccacttcaatgtacttcgggaggaaagctgattcttgcatatcacagcagagaatgggtggacagttatttgaactataacccgctgaagcagtatacaaacaatacgattatccataaagaaaccctgcacagagagctggaattaatccggcagcagggatactcgctggataaccgggagcataatccggacattgtctgtattgcggcacctatattcggaattgatgggaatcttgcaggaacaataggaatttcggcgccggattaccgattttctccggagaaagcgtgttcctttgcggaagaggtaaaacgaagcgcagcggcgataacagaaaaattaaaagcataggaggacatatggaggactttacttataaaaatacgaaatacagaagtgcagttgtcgtaaatggaatgagtatggcgggaccaagagcacacttccggggaatgggactgtcgaatgaagaattaagaaagccattcattggagttatcaatacgcataatgaaatgcacccgggtcatgtccatctggataaactggcggaacaggttaaggccggggtatcggaggctggaggcgtaccgtttgaggtcaacacgatctctatctgtgatggttttactcagggtcatgcggggatgtgcagcgtgcttcccagccgggaagtaattgcagattctattgaagtgtatgtaaatgcccatatgctggatgggcttgtactgctgggcggctgcgataagattgtaccggctatgctgatggccatgctgcggctgaatatacctgcaatcctggtaacaggcggaccgatgatgcctgcagtatatcagtccaagagctatgcaacatatgaattaaaggagatggctgggaaactgttaaagggtgagatatcgaaggaagagtacgaggagatggaaggtatcatgtcaccggggcccggttcctgcgccatgatggggactgctaacagcatgtccgttgcggcagaagcaatgggtctgacgctgccgggctgtgcaggagctcacgcggtagctggaaaaaagaaacgtattgcaaggcaaagcggcgtacagattgttcgccttgtggaggagcatatatgtccccgggacattgttacccaggctatgctggatctatcggcaagagtttgtgtcagtgtaggaggctctaccaatattatgctacattatccggcaatcgcgagagaaggcagacttcatatgaccatgaaagaactgggagaaatatcgaagacaacgccatatctggctaaaataaagccgtccggtatacataccatgctggatttcgatgaagcaggcggtgtgggtgccgttctaaaggctctgtccggaatggtaaatctcgacctgatgacggtgaatggaaaaactcacaggcagaatacggatcagctgacgatctggaatcaggaagtaattcgaactgtggaacaagcctacgctcctgaaggttccattgcagttctgcatggaaatctggctccaaagggctgtgttgttaaacagagcgcggttgcccctcagatgagaaaacatacgggacctgcccgctgctttgaatgtgaggaggaggcagtaaaggcaatttacggcggttctatacaagatggagatgtcattgttatacgaaatgaaggcccaaaaggaggacccggaatgcgggaaatgctgactgccacagctgccctggtaggcatgggatattcggaaaaagttgctctgattacagacggccgtttctccggagcgacacggggaccgtgtatcggacatatttcaccggagacatcgcaaagaggaccaattgcggcgctgatggacggagacagaataaccatcgatatagacggaggcagcctgtctgtcgaactgtccgaagaagatctgaaaaaaaggctggaccggcttccggaatttcaatacaaaataacagaaggttatctttaccgttatgcgagagaagtctcctctgcggatgaaggcgctgtattaaagtgaggagaagataaatgaagaatgtaacactgcaggggattaccgctccggtactcactcctttttgtgaaaatggtgaagtgaatacagatgagtatgcaaggttaatccaatatatcacaggttgtggcatcaaagggatttttgtaggaggaaccagcggagaatttgttaatcttagaatggaagagagggagaaacttctggatgcagcgagagaagctgtggaaaaagatactaccgtattgttcaatgttacagctatgaatgagtacgaattgtatcatatgattgaatggggcaggaaaaagggcgcagatgcggtctcagtgacggctccgtattatcacagatatgatgagaaagcgttgtgccggtactttggaaaagtggctgaagcagcagaggggatgccggtatacctgtacaatatgagtggcatgacaaataatcccatcactccggcaatactgaaaacagtggctgaacaacaccgcaacatttgcggagtaaaagacagcagcatggatttcatgacactcctgaattatcagattgcaatggaaaagatggattttgaactgattacaggaaatgatgctcaggtgcttcctgctcttcaggccggagcatctggaggaatcattgcagttgccagcgtgttccctgaacttgcggtaagcatatggaatcattttaaagatgacaatatagaggctgcgagggaatctcaaaaaaaggttttgaggattcgtgaactgttccgcactgtcatgccgactattgcgcataaggaggctctgaagttacagggatttgatatggggccgtcgcgttttcctttcagggatttgaccggagaggaaagggagagactgaaaaagggcctggaagatctgggcataatcaaggaagtttaagtgggaggtatatatgattactggaggatggttaatcgttatttttttgattgcaatagcaatattactgattactattattaaatttaaagttaatgcatttatcgctttactggtaacaacaattggaacaggtcttatggtacggatgcctgtctcagatatatccaaagtaatcggaaatggctttggcaatacattggggagtattggtgtcattatcggtctgggagtaatgctgggaagatttttgtacgagtccggaggaattgaagtcattgcggatacttttctgaaaaagtttaatggctcaaaatccagaattgcggtggcgatggcaggatttatcactggaattcctgtgttcggagacgttgtacatataatgtatgcacctatggtccgcgtcatatcaaagaaaacgaaggtatcgatcgtttccctgtgctgtgccactgtttgtgccaccgttgcgaccggtgcgatggtaataccgacacccaatcccatggcggttgcggaaaatctccatttggattatggggtattcttcctctatgccgcactggcgggactgtttggtacccttgtaggcggtctcggctatggcagatttctcgattggcaggatcggaaaaatcatcatgaatatgcatttgaggatatcgaagattttgaaaaagaaagcgaaacatcggctgccgatagaaaggttccgggttttggcgtagcggtatcgattcttatggttccgattatgctgatacttttgggaagctttggcccgatgattctgccagagggcggaacaatcattaaaatactaaattttatcggcgataaaaatattgcgatgctgatcggtgtgatttatgccgcgctggtttctcttccgtatcttcagaagccggtaggggatgtgatgaatgatgcggcgggccaggtaggtctggtacttctcatcaccggttctggcggagcctttggaaagatgcttcagtcaacgggaatcgctgattatatagccacatcgctgtcgcaatttcatattccggttctggtgctgtgctttatcattgcccagattctgcgctgcgctcagggatcaacaggagttgcgctgattacaacttcctccatgtttgcgccattgattgccgccagcggaatatcaccggttctttgcggtattgcaatctgtgcaggagggatcggattatctcttccaaatgattccggattttgggcaattaaccgtttttataaaatatccgttgaggatacaatacgtgcatggacgattggaggctttgtaacgggagttgcagcactggtatttgtctgtattctgtcattgttccagacacatttgccgggcttgctataaaaatcacgaataactaaaagagcgtctcttttatggagtgtattcataaatagagacgccttttttggcttcaaataaaaaaagcccctgaaaagggaggagccggtgaaatgtgggtttcaccggcgagttatgaaaaaaagtctttttagtaaacaagtattgttcttgtctatggttatagtatacggtcgatttatgaagtaagtttgtagaagatgtaaataaattttagacagcatataaaaaaagtatgaaatataaaatttatataaaaatcctcgctgctgcctcctgtcttttccgcccataccggtctgattcatcaggcttatcagtagtaggaaagaaacggcgggccagttattctattgccgcccccctcctttttgtgatatagtagatacattgaaaattgggaaaagccgttgatacggcgagggggctggcatgaagaaaaaagataaagataaaatttccatgaaatggcgcatgatagggatcatgctgatgtgctggttcctcccgttctgcctgattatcggagtggcgggctattatattttgagcaaccgctacgggactgtggcacaggggattgtggaccaggtagtctatgacggacagatctgtgtggaacggctgaattacggaatcagtgcgtccaggaaggcgacgtatgatcagactctggagaaagcatggcgggaatacagccgcggcattagaagctacggcggactgtatactgtgagcaatgattacttaaataaagaataccgccagaaccaatgcttttccaccaccatcctgtggtgctacgaggaaccggaacgcatgaactgcagcgtctataataattcggccggcggtacctatcagcaggtgcagacctactggagagaggaccatgaaaggatcaaagagtttctgtccacgctggataccgctttaggctacatcaatatagacggccggatttatatggtcaggaatctgcttgataatacgtattatccgttcggggcgctgattatgcgcctgaacacgtcatactgttttggacctctcatcgattctccgcagggggaaaatgttcttgtccggctcgacggccagaccatcctgttaaagggggagaacatggaggaaaagataccaaaagacagtgatgtatctcagacaggctacagccgcagaaatggaaatatgtacgtttacgatacgcagaaggaggagtattttaccctgtcggtgctgatgcaggcggacaagaatattatccaggctccgttttatggatatccctttgtcatcgcaggcatgcttctgtttctggtgcctctgcttttgattctgctgcgtgtgttcaaccggaatgttacgaaaccgattacggtgatgatggagggagccgatcagatcgaaacgggaaacctcggataccagattaaagaagcaccggaaaacctggaatttaagtatctgatggagtcctttaaccagatgtccgagcggctgaagtaccagtttgaccatatttacgaggaggagattgcactgcgtgatgccagaatcatggcgctccagtctcatattaaccctcattttatgaacaacacgctggagatcatcaactgggaagcccgtttgggaggaaatgaaaaggtatcccgcatgatcgaggctcttgcgacgctgatggacgcggccatggaccggaagaagagaaccctggtgccgttgtcagaagagatgatctatgtaaatgcttatttatacattaactccgaacgattcggcaagcgcctgaccgtagtcaaggaactggatgaatccattatgcagtatgaggtgcccaggctgattctgcagcctgtgattgaaaatgccatcgagcacggcgtaaggcccagcgggcggggaaccgttgtcctgcgcggctatgagaaagaggggtatctctacctggaaattgtaaacgacgggaccctgacacccgcggaggaagagaagatatgccgtctgctttctccggaatacgatttcagccgggaaccgtccggtaatcttggcattgccaatgtgaatcagcgcctgaggattctttatggagaaccctgcggccttacaattgaaaaagatgatgaacagcatgtcattgcgcgtcttaccattgcggcacgataacaggcgtaatggcgaacaggttcagataaatggtacccggtccgatcccaccctgagtgtaaaatcggaccggaattcatttgtctgaacttgttctgtgataagtgaacaagaaaatacaacaaatggcataactggttattcatttttgcaaccgaatcagcgataataatgacataaggtatacaaattgcaggaatgcaaagggtgtataaaaaacaggaggtattgatatgaagaaaagaacaatggcattattactggcaggagccatgaccacaaccgtatttaccggctgttccaagcagtccactgctgatacgacagcagctccgaagacagaggcgggaactgaggccaagacagagggcgaagctaagacggaggccccgacagaagcgaaaaaggcagtggcattaaacgtaatgacaacctttgccggtgaggacggaaatgcaccgaactaccagaaggcagtaaaggactgggaagcatctaccggcaacaccgtaaacgattcttccgcagtttcagatgagacggtaaaggcccgtgtggcaagcgattttcagatgggctccgagccggacgtactgttctggtttaacggcgcagacgccaactcctttatcgaagccggtaaggttatatccatcgatgatatccggaaggagtatccggagtacgcgtccaacatgaacgatgatttaatcgctgcgtctctcgtcgacggaaagaaatacgcagtaccggtaaatggtttctgggaggcaatgtttgtcaatacgactgttctggacgccgcaggggtagaagtaccgggaccggattacacatgggatcagttccttacagactgtgagaagatcaaagcggcaggctacagcccgatcgcagcagctctcggcaacattccgcattactggtgggaatacgccatcttcaatcacaacaccccggcaaaccactgtgatattccggaaacggttgatgacgcacaggggcagtcatgggtggcaggtatcaacgatatcaaagacttatatgaaaaagagtatttcccgaagaacacattatcagcaactgacgatgatacgttccttgctttcacagaagataaggcagctttcttaatcgacggttcctggaaggttggcggaatcgcaggcgcatgccagtctgacccgaatgatccggctacactggataaagagaaacttgacaaatttaccgtaacctacgtacctggccagggcgacagaaaagcaaccgatttaatcggcggtctgtccatgggctactatattacgaagaaggcatgggatgatccggaaaagagagatgcagcagtaaactttgtagaatacatgacatctaacgaaatcgttccgatcttcgcacagcatacggcttccgcactgaaagaagcaccggaagtagaccagagccagtttaactccctgcaggtgaaggcaatggatatgatgagcggcgttacatccttaacaccggctgttcaggatattttccagggcgaatgcagaacgtcaacattcgacggcatgccgcagatcgtaacaggcaaggtatcagcagaggatgctgtgaaggaaggcctggagatttaccacgcaaactaaataactgtcaattgaaagccggagacgtaatggcctttcgtctctggcttttttacggaaaatagggtgagaatatgggagcaaatatctataaaaacaaaaagccgctgttcctttttctggttccggcgttcgcctttatggcaattttcttatactatccatttatacagaacatcttgaacagttttaagcagattacggaactgggagccgccagcaaaggctggaatgatccatggtataccaactatgttaccatgttccaggacgaaaacatgcgtgtagcagtcagaaacacaatcctcatgatggtggtcaccatcgtcggccaggttggaatcgccattgtcctggcacttctggttgacaatatcagccatggagcaaaattcttccggacggtctactttttccccatcgtgatttcggcaacagcgttaggtctgatgttcaatctgatcttcctgtacgacaagggcatggtgaatcagctgttagagagtttcggcgtcaccgaactcatcgactggaaaggggagaaactggcgctcattacgatgatgctgcctgttatgtggcagtatgtgggattctattttgtgattttgatcacgggactcaataatatttccgatgaactttatgaggctgccgctatcgatggggcaacgggattccagaaagtaagatatgtctccattccgctgcttcacaatgttatgtgtacctgcgtggttcttggcgttaccggcgcattaaaggtatttgaccttccatggaccatgttcccgaaaggaattccgctgggtgagacatggctgaccggcacatacatgtactaccagacctttaataccaaaaatgtcgattacagttctgccatagcagttctgatcgtagttctgggaattgtgacggcgaaggtggtcaacacaattttcaaagaaaaagattattaggaggggattcatcatgaacagagggaaaaaaatatcgctgggaagtgtagtcatctacattgttctgggcttctgggcacttaccacgatttatccgattttctgggtcatcatcaactcctttaaggcgaagggcgagatcctttcgaattcctttgcacttcctacaggagcgatgtttacactggctaactaccggactgcatttgaacgtctcagtattttcagtgcataccgcaacagtatgataatttctacttcggtggcagtgattgtcattgttctggccggtatggcatcattcggtctggtacgctacgatttcaagcttcggaaaccgcttaattcactggtagtagctggtatgatgtttccggtattctccacaatcatcccggtataccgcatgctgagttccattcatatggtcaatacggagagtctggctctgtccttaacgagcgtgattcttccgcaggtagcaggcaatatgtccttcgccatcgtggtgctgacaggctatgtgcgcagtctccccatagaacttgaggagtcggcttacctggaaggctgcaatcctttccagatcttttataagatcgtagtacctcttgcaaagccatcctttgcgacagtggcgatcttttcattcctctggagttataacgatctgtttactcagatgttcctgctgcgtcttccgcagcaccgtgcaatcacgcgtctgttaaacgaactgacttccaatgaaggaacgaacttcggcctcatggccgcttccgtggcactggttattattccgattctgattgtctatatcttccttcagaagtatattatcaagggaatgacggcaggagctgttaaggggtgataaaaactcggaagtatggtatactgatagcaaaagcgcgtttataaaatgacgttcggggaagagtgggaagcagatgtatagagtggtaattatagacgatgaaccgattatagttgaaggtatttccaaggtggtgccgtgggcggattatggctgtgaagtgacagcgaccgcctgcagcggcttagaggggctggagataatccgaaagctgcggccggatattatctttacggatatttccatgccaggaatggatgggctgtccatgattgcggcgctccgtgtggagtttccggagatgatgattgccatcctgaccggttaccgggactttgattatgcgcagaaggccatacgcctgggggtgaaccgtttcctgctgaagccatccaatatggatgagatcaaggaagcgcttcagttcatggcggatacgctgaacaaacgaaaggaacaggaacatgctttaaagacgcagaacacggcggaagtctcaaatactactgcagcagaaccggaagggaatgcggagccgggtgccggtggtaatgaagattcatcagaacataatgccggaagctttattgtaaagacggcgctcaaatacatggaggagaattatacacagaagatcactctggctgaagtcgcggaaaagacgtatgtcagccagtggcatttgagtaagctgctgaacggccatactgggaaaagcttttccgaacttttaaaccacatccggatcgaagaggccaagaagctgttaaaggacccgtctctgaggatcggcgatatctcggaagaggtgggattcatggatgtggcgcatttttccaaggtttttaagaagctggaggggatatcggcgaacgaatatcggaacagcagaatttaactgaaggatcatccggttatagtatgaaaatattgtatgagaaaacagggcggtacagaaagggaatttttctgtgccggcctgttttgtgattgtgaaaaacgtataaactgtgatatgcttactataaataacaaattataccgcagacagtaagaatagaaatacgaggaatgcgaaagagaagggaggaacgaaatggaactgctgcacctgaactattttagagaggtagctgctgtggaaaatattacgaaagcggcgaagaaactatatgtgtcccagccggcattatccacggcgattgccagactggaaaaagaactggattttctgttatttgaacggaaagggaaccgcattgaactgacggaggcggggcgctgtttcctggaatacgttaacagcgcgttttcccttttggaagagggaactttaaaatccaggcaaatcgcaaaccgcaataatcggcgcatggtgatcgcctcgggcttcggcgtgttgagaaatatgctggacgattataagaaaatccatccggagtgcgaggtggaactgaagttttgtgatacagaccggattcatgcaatgctggccagcggtgacgcagatgccggactgaatctgggggaaatacttgacagccgtttaacaaaccgggatcttatggaaggaaggtattatatagcagtgaataacactcatccgttttggggaaagaacagtgttgaccttaaagatttaaatggtcagctgctattctgcagcaacatcgccaggacatttgagacaggcatggagatctttcagaatgccggaatcagctgcaatctgctgaaactggatgagcgggaggtcctgttctcggcagcgagaaaagggttgggaggtgtgttctgcatgccgatgtttgaggaaaataaatctgtggagatgaagcaggagaattcagatccggccgacagaatctgctttattcctatcagggactgtgaggtaaaggcgagtgtaacactggtgacccgaaaagatcattattacacagctgagaaccaggattttattcagtttgtgacgcagcgctttttaaaaaaccagattgccttaaacagcgatctggagcagaggaaaatcgggcatggaattgactgaatgcagagtaaaagcagatggaaaatcagcttgaaagtactatgccaggtacgggagtcagaggaaaaggcttctggtatctggcttttttttattctgctacaagtataatccaaaagttatactttctattccggttttggaattttacaggagcgtccagacatggtataagtaaaaatagataataaatatgtcggtgaagatataaaaacagcaaaaatgcataagcaaaaagtgaatgaaaaattatgtgttaaaatcagagtatttcagagaggagcgatagaatggcagaggcttttttgcatggttatacaggctttgtgggtactgcttcaaccggtggaagcagggggatttaccggattagactcaatgcagcaaccggagagattcatgtgttggatacaatgcccatgtatcatgcggggtatttaacaatttcgaaggacagaaggaatctttatgtactgagcgaagggatgacatttaagggaagggcaagcggaggcattacggcctatgacataagcgatgggaaatttgaagaattgaactgggcggttacaggaggtcagcgtccgtgcttcgtgtattgcgacgataacagcgcggaaatctacgtcagcaatttctatcaaggcacaatggctgctttcaggagacaggacgatggaaggatcggtgagcggctggcctgtgtaaaggctcatgatacaactccggtgggaccctttcttcactgtgtaatgaaatcacccgcaggcagatatctggcagcactggaattgattgggggaagtatctatatttatgactgcgaaaatcaatacaggcttgtctggaaagaggaactggaggctcactccggcccaaggcatatggtattcagcgaagacggcagatttctctatgtaaaccgacaggatgatgaaaaagtatcggtctactattttgcaccggacagtaaaaggatacttactcatgtgcagaccatctctgtccggactccggatatgaagggaaaaacggaacctgccgccatacggctgtgtccgggaggacgccttctggcggtcagtaaccgcggtatggggagagaaaaccgggaagattccatttcaatttacggtgtggatacggaaacaggcagaattacgcttatttctgtgataaagacggagggtgagatgccaagagatattaattttacaccggatggcaaatttctggtggtggcttatcagtttcaggggtatcttgatcttttccgtgttgagggagaaacactgatttatacaggggctggctttaagattccatctcctgtgtgcattgcattttaggaggagaggattatggatgattctgcagaaatccgcctgcgccgtctggaggcaagggcggaaatagaaaatttaataggaacatactgtcatcttctgtttgcaggagagggcgggcagattatggacgagctatggtcgcagtcggaggatataagcatagaaatcggcgcttccggcagatattgcacgagagaaaaggtggcgacctattatcagaaggatcatattgcaggtaagtttacactgttgcttccggttacaccagtaattgaggcagcggcggatggaaaaactgttagaggtatgtggtttgttctgggactggattcagatgcgggagaattgggaacagcggttacggaagaaagagaacttctcacttccaggacgaaagagggaaaggcctatcaggcagaatgtgctatttggcggctgggggcggattgtatcaaggaaggaaagctatggaagattcttcatctgcatcagtatgatatgatacgttttccctgcggcagcgactgggttcgttttgccgaggaacgctttgcaacagatggtatacggctggatgccatgtttcgctccaatcttctgtttgcagaagaccgggcgccggaaaatctggccaatgcaccgacttcctatcactggcagtaccgcgtggatggcatgacggagagtgaaccgaagctgccgaagccatatgagacgtataaagagacggaccggtattaagaagagaaagcagaaggcttagtgtcttgctgaataaatcaagcaaatataaaaggaggagctttacaatgaaaaaaatgggggtattacttcttgcggcagcgctggttatgagtatgacggcgtgcggaggagggaacaggaatacaggagaaggtacgacggcatccggcggaaacaccagcacggaagccggagcaaaatcgggtgaaggcgggggagaaaagactctgaatgtgggtacaattaatgtgcttggaacatttatgccgggaagtgaaaatgaagtatgtcattggggctgttaccttgtttacgactatttgttttattatgacgaagagaacaatgcattctccgatatcttaaaaaactggtactacgaagaagacggtacaacctttgtgatggagtgccgggacgatgtttactttgcaaacgggaatcagatgaccggtgaagatgttctcttctccataaagactctggtggacagagggaccaaccaggctgcgtactatgcgacggttgactgggataattcttatgtaagtgaagacggctttactgtatatctggcaaatactcaggaattcggcccgggtattatcaatatgggcgtcgtatatctgctcgatcagtcctggtgtgaggaaactggttttgacaacattgatccgtggcttaatgcacccaatggttccggaccttatgaagtcgccgaatatgtcacagactcctatgtgacgctgaaacgccgtgataattactggggtgatttttcaggtgcagacacagttaaaatcaatcattatgcggaagactccgccatgtatatggctctggagaccggagaaatcgatttggcgcttaacatcgcagaaagtgattacagccgtgcgctgaccgatgataagattgcagttatgacgactcatgaaggcgaaaatatccttctggcactggataataataatcagtacatgaaggatgagaatgtgcgtctggcaattgcctacggcgtaaattggcaggatgttgcggaatcagcccgtggggaactggcagaggtaccgagttccattattacatctgtgagcccatactacaaagataccggtgcttatgagtatgatccggagaaggcaaaacagtacatggaggcagcgggatatgcggcagacggatcaaccgtgaacttcacactgaatatgacaactgtggatcaggcggtaaagaccaacgcagccactgtaattcagttttacttacagcagctgggtatcaatcttcagatgaacttcaccgactttccaaccgctttttcggcgtggctgacagagggaggtacagacttgaatttccaggattccgatacaggatccgtgtgcggggaaccgtatatttctcttcgtttctttcctgcagaactggcgacgttcccgtttgccgctatttcagatgaaacgtttgtgacactttacaaagaagcaaactatacgacggatgatgatgtacgcaaggagaaatatgcagaacttcagcagtacgttcatgatcatgccatgattatcccgctttacgagtcagtggacgctgtagcctacaatccggagaagatcgaaagcgtcagcctgcacagcgcggtaagtgcaaacctgcgttacgttactctaaaataacaggaagtgaaacgaggttgacaaaatggctaaatatatcttgaaacgcatcttatggatcgtaccagtctgcctcggcgtgctgctgatcgttttcagtatcagttactttgcgccgggggatccggttatgtccatgctgggagccagcgggtatacaccggaaacatacgccagcttaaaacatgagctggggctggaccaaccgttttttgtacagtatatccgttacattgtgaacattgtcacaaaatttgattttggtaattcctatacatatgggcatgcggtcagtggagaaattatttcccgtattggcatcaccgtaaagctgggcgtgctgagtgtaattgtcaccacactgatcggcgttccattcggagtaatatccgccacaaaacagtattcagcgatggattacagcgtcacggcaggttctctttttttcgcggccatgcctaacttttggctggctcttatctgcattatcgtgtttgcactgaagttaaaatggctgccggccaccggaatgggaaactggaggtatatggtgcttccagtcctggcaaattccatgggaactgtggccaatgtggcccgtatgtcccgatcgtccatgctggaggtgatccgttccgattatatcaggacggccagagcaaagggctgtagggaaaatacagtaatctggcgtcatgcgctgcacaatgctgtgattccgattctgacggtggtaggcatgcagttaggaactgtgatggcgggatccgtggttattgaaacgatttttaatatgccagggctcggttcctatcttctgaccggtatctccggccgggattatccagtgattaacgcctgtgttttaattcttgcattctttatttgtattatgaacctgatcgtagatttgtgctatgcgtttgctgatcccagaatccgctcgcagtacgtgtcaggaaagaagagaaaagctgcagtaaaggaggggtcataatgtccggaaaaaagaaaaaagaaacatacatacagtctctggaagggctgactcgtaaacacagccagtggcgcgatgtgatacaccgtctgtttaaaaacagacttgctatcgtagggctgatcctggtggctgccgttctctttgccactatatttgcaaactttctaactccgtatgattacagtacccagtcattcagtgaccggtttgtctatccatgtctggctcatccatttggtacggatcagtacggccgcgatcttctggcccgaattctatacgggggccgggtgtccttaatcgtggcgttgatagcagttgtgatttctctggtaataggagctgtgctgggggcggtggcaggatatttcggaggaatttacgatacggttatcatgcgggtaatagatatcattatgtccattcccggtctgcttttagcagttgcgatctcagcggctctcggtaccggattactgaataccggaatcgctgtcggacttgccagtatacctggaggcgcacgaattcttcggtctacggttatgaccatacgggatgagcagtatattgaggctgcgagggcagaaggcgccggtcatgcatatatcattgtgcatcacgttctgcctaatacaattgcaccattgattgtggatgcctctttaaaagttggtatggcaattcttacaatttccagcttgagctttgtcggactgggggttcaggagcccacacctgagtggggcgccatcttaagcagcggacgcgcatatatccgtgatttctggcctctggtaatttttccggggctggcgattatgacgactctgctgggattcaacttattgggtgacggtctgcgcgatgcgctggatcccaagctgaaacagtagggggaggagattacatgagtttactggaaattaatgatttaaatattcattacataacggaacaggcaacgtttcgggcagtaaatggtatcgatttgtctctggaggaaggcgagacgctgggactggtgggggagaccggagctggaaagacgacgacagcgctggggatattaaacctgattcccaatcctccggggaaaattgtgggcggtaagattctttataagggagaaaacgtggtgaccatggatcaggcggctttgcgaagacttcggggaaatgaaatttccatgatctttcaggaccccatgacagctctcaatccggttatgagggtaggagaccagatcgttgagaccatcagcctccatatggagtgttctcgggctgaagccgtagagcgaagcctcgatatgttaaaaatggtgggaatcgggccggagcgaagtaccgattatccccaccagctttccggaggaatgaagcagcgggtggtcattgctatggcactggcatgcagtccggcacttctgattgcggacgagccgacaaccgctctggatgtaacaatacaggctcaggtcctggagatgatcaacgatttaaagaaccgcttaaaaacgtctgtcctgctcattactcatgatctggggattgtagcggagtgctgtcagaaagtggctgtcatgtatgccggagagattgtggaatatggctctctcggcgatatctttaagaaaacatctcatccttatacaatgggattgttccgttccattccatcgctgacgcggaaggagaaaaggctgagccccattgacggtctgatgccggatccggcaaaactgcctgaaggatgctgttttcatccgcgctgtctttatgcggatgatatatgtaaaaaatgtcatccggaactatcagatacagggaacggtcataaagtccgctgttttcacctggaagaggcgaaaatggctcacggggaggtgaggacgaatggctgatttgctggaagtaaagaatttgaagcgatatttcaaaacgccgacaggggatttgcatgcggtggacggtgtgaattttacactgaaagcagggaaaacactgggggtggtaggagagtccggatgcggaaaatctacgctgggccgggtggtactggggttgatcgaagcgacggaaggaaccgttttatttgaaggaaaagatatcacccatttaaaaaccagaaaacggcgggagatgtgtaaagaaatgcagatgatatttcaggatccgctggcctctttaaatccccgtatgtgtgtggaagaactgattatggatcccctgaaaattgtccatgccagccgcgataaggagacaatgcggaagcgagtctacgaactgatggatcaggtagggctggcacggcggtttgcctgctcctatcctcacgagcttgacggcggcagaagacagcggatcggaattgccagagctcttgtgctcgggcctaagttccttgtctgtgatgaacctgtatcagctctggatgtttcgatacaggcacagatcatcaatctgcttcaggacattcaggaagaaagtcgtttatcctacttgtttattactcacgatatgtcggtggtgaaacatatttccgatgatattctggtgatgtacgtaggctgtatggtggaaaagagcagttcagacgacttatttgaccatccgatgcatccctatacgaaagggctgctgtcagccataccggtaccggatatcgatgtgaaaaagaagcgggttcttctgcagggagaactgtcttcacctatcaatccaaagccagggtgcaggtttgcaccgagatgtccctacgcagcagaagaatgccggatacggcagccattatttgaagaagttatgcctgatcactttgtggcatgccataaagtacgggagattaatcagctgtgacaggccgttttgaaagacggagaagaggaggaaaaacatggtatttgagaaaattagtaatgtggatcgttatgacctgaaaaatgaaaaatttacggaggcattcgcttttttaaagcgggaggggttggaaaaactgccgattggtaactttgaattatgcccaggtgtgattgttcaagtacagagctatgagacagaaccggcggctggaattgattatgaaacccatgactgtcactttgatattcattatgtgattcatggactggaagggatcggggtgacggggcgtgatggtcttacagaaaagggagactacgatccggaaaaggatatgggctattgggaagggcctgaatatgaggggatggtgattctgcatcctggagaatatgtgattctggctccggaagatgcacataagccgcattgtgcagtgggagaaccatgcagtatgagaaaaattgttataaaagtggaagtgtagaacgtagaggaataggaaataaagaaaagaggaagaaaagccatgaagattttacattgtgattccagacgagatgagattcagaaaacagtatattcctgcggtgagtttgcctatgagtatatttctgattttgcgagaaatttaccggataatgtggccaatgccagtattgcgggcggctgtaccgatcaggaaggaaatgtctatctgggtatgcgcggaaatcccagccagatcgtgaagctggcaccagatgggacgtatatgaaaggatttggaggggaactgttgggcgattacctgcattttattaaatatacgccgcagaacacgattctgtgtacggatacccataatcatatcgtacgcgaatttgatacggacggaacactgattcgtgattttggtgaagcaggaaagcccagtgacacagggatggatatggggacactggccaggatgcgcagagatggaaagattttccccacagagccttacctcggcatagtaggaatgtgggctttttatgaagcgcagcgccgtgtaaaacgagttgcgggcccctttaacatgccgactgacgtggatatgacatccagtggtgaatacatatttgcggatggatatgggaaccgggccgtacatatctttaatgcggatggtacttaccggaagacgttcggcggtgtgggagactgggaaaaaccttatgaggacacaccgggagatatgctgatcgttcatgcactgtgtgtagacgcgcgggatcatatctggatctgtgacagagaaaaggatgctgtgcatgtatttgatacagacggcaatgtaataggctactgcagtaataacatgggaatgccttccggcgtggatactgatggcgagtatatttatgttgtggggcgcgcgggttatctgactgtgttcgatttggatatgaatatggtggcgcagctgggaacctttaattccgatctgcgtgcccatgatctggctgccaataagcagggtgatctgttcctgttcccgactcatgcaaatgaggatcatcaggtgattaaactgcgcagaatacgaaaatagcggagttgtaactcagtactgagaataatgaaatagaaaataatatttaagaaacgctccattgaaatgtgatctgtggaacgtttcttttttctttatttttcttatcactgtaatatatctcgcagtatgatccaattggtaactggagacgtacttgacgccccggttttactgtatcttcagggatgaccggctcctccctgccatattattcagggactggtaacagtttagccgggagtgcaggccggactgttgcaggtactgtactgtaaaaccggaaactacttgtagtttcttttattattcgatataataaagatattcgcctgaaaacagagtcgtgtggatcaggcttttatttcgaaagagaaggaagttggtaggacgtatgggtggaaagttaaaagctttatttgcgcagacagatatgacggtggggaagccatggaaacagatcgttatttttacgattcccatgttaatcggtaatatcgcacagcagctttataacacggtagacagtatcgtggtcggaaagtatgtaggagataatgcccttgcggcggttggaagtgccagcccgattttaaatctgctgctggtactttttattggcatatcgatgggaaccagtatcatggtatcacagttttttggagcaaaggacagggagcatctgtcgaagacgatcgggagcaccattaccttgactgcggcggcctcgctgatcattatggtattcggttcggtgacaatccggccacttttaaaaatgctgaacacaccggccagcatcattgactggtgtacctcctatctgctgattctgattgtgggaatcatgggagtcgcctattacaatatgttctgcggtatcttaagaggtcttggtgattcgctgtcagctctgatctatctgctgattgcaacggtaatcaacatcattctggatctctggttcgtagcgggcctgcagatgggggtggcgggtgttgctctggctacggtcattgcacagatggtatccgcggtcctctgtttctttaaactgaaacggatgacggatgtctttgatctgaagttccaatatctcaagccggatatggagaatatcatgacgatcctgcggctggggcttccgtccggtatcacacaggccattttctccatggcgatggtggtggttcaatcgctgactaacagcttcggtgaaatggtgattgcggccaatgttattattatgcgtgtagacggatttgccatgatgcccaatttctcctttggcacggcaatgaccacatattccggccagaatgtgggtgcaaaggagattgaacgggtacataaaggcgctaagcagggaaccatgatagctgctggaacgtcagcagtgatcacagctctgattctgatttttggcaagtatctgatggggatctttaccaatacctcggagcttgttgcgctgagtgccaatatgatgaagattctggcagttggctatatcgccatggcggtgacgcagagtctctccggtgtgatgagaggtgcgggcgacaccatgacacccatgtggatttccattgtaacgactgtatttatccgtgttccgctggcatacggcatcgcttattttacaaagacgccggaacttccgggaggcagatacgagtgtatctgggtatcccttctgatctcctgggtattgggcgcggtattgactgtaatattctacaggattggtaaatggaagaataagggattggagtcataagaaattggtatcataaggaattgggccatgagacagaatcatggacaggaataaaggttgaatcagaggtgaaacgatttggatgaactgagatggtatttatacgatcttgtccgcgaagttatggaaaaacatggaacaggggagtcgacttattccttggagacggtcagggaaggtgctgtgtgtctgattccttctgagcatggttttctggtcactggcggaggggagagggagtcggaacaggaagatttttaccgtgggagccgggaatttttccggcggattttccaggatgatgaaatggcggagaccgtcatgcaggaatttctgacgagaacgctggaccttccggctatcatgaaaggaccgagcataacggggctggaagcccggatttttaagtgccgggaagagatggcggcactggagcaaaaggcactgaagccggatggacagaaatggaagataaaacgcaaacttgaccgtatttacctggaggggcttttaaaacaattagaagaaacggataaaaaacggtacgaaaaaataaaaatggaaataaatgattcgggaagtgtatagaaaatcattttttgtttaaaataggagtataccaaagatgagtgaatacttatcctcccctttttagtgtgggaagccggaaaacctgatgttttgcggcttcccacattttttgatgttataaaaaggggcaaaagtggcggcaaactgattaaagggaactggaaagccgagacagcactgtagatagtctaatgtttcggtaatgatgtgatcaagagggctgcatttgttaaagaaactaataacaaaacgaaacttatagctcatatgagtaatgaaatcagttgtgaaaaataaacagggattatagcagagaaacaaaaggtaaaccgacgttccatctaataatagtatgggaacatcggtttatttttgctgaaagcatattagtaaatgatgattagaacgaatttatagaaaaagtcaatagactttacaaaaattaactcctaataattttgggaatatttactaaaatttgtttgactgtattatctaatattgctatatttaatataagatctaataattaattgattcaggagggggataatcagtgaataagcgcaaaatcaaaggcatattgacgtggatattgatttttattatgttaatgcagaatactgcatatgctgaaggatggaaacagaaaaattcagactggttctacgagcagaatggttctaagcagactggctggataaatgatggaacaggtcgatatcattttgacgaaaatggcaagctgcaaacaggatggtatcaagaaaatcaaatatggtactttttaaacacggttcatgatggctattacggaagagcattatccaaccaatgggcatggattgatggttacagctattccttcgatgcagatggaaaaatgtatgcaaattgcattactccggacggatatgaggtaaatgcagacggaagatggacagtaaatggagtggtacaatttattgaaggaaaaggtattataacaacagccacaacgcctgggagcggaaaagtttccggtggcataacaagaggcggaggtggttccggcggcggtggcggtggtggaggaagccatagcagtggcggaagtagttccggaggaggaagttccagtggcggaagtagctccggaggaggaagttccagtggcggaagcggttctggcggaggaagttccagtgggggtgacggaagttctgatgacacctcgacgcctctcccggaaattgaaggcgttgaatttgcaaaagatgttaaggcctccagcttggaattttttaataatgaagacgataatattattacaattcctaatgcttccagttcagataaatttgaagagggacaaatctatgttcttcataatgaagcatcttcagaaggagatattgcagtcaaggtaatagatgtcaaagaaacaacaaatggtaagcaagtctattatgaagaaccagaattggaagaagtgatcgattctcttcatatttccggaacggaaacatctgagagtgagtttatacctgcagaaggagtaactgttactcaggcaggaagaatgcttcgttcgtctggaactgtgaagtttaattgttttaatggcttaaatctaaaggcaacagttggccctgtctcttattctggttatctacgccttaatagtgctacatatcagtacaatgcggataaagaaggaaagttattgaattatgataatggcaagttgattctggatagtacatttacaactaccgcaaagattgctatggaaggggaaaaggtgccaattgaagtagagattggaataattcgagttcctatcaatgcagttgtctggatagaggagcatgttagcgtagtgatatcagcagatggcggcgtgcaattggctatatcgacgaatagtcaaactggagtggagtatacaaagagcgaagggtttaagccgatttgtattgtagatccggcaattagtgatattacttataatggagcgttaggactttacgtgcaaagttcggcgaagcttaaagtatttggaattaaatcaagtgaggttggaggaagagctggagtagaattaaatggtgaactcaaagttatcagtgatcaaccgaaacaaacatgctgcgacgtaaagatcagtctggctgcatcgcttttcgctcagattggccccgattattttaatataaggaaaactattccgattggtgcagtagttcttggaaacctgcatattgaagaaactgggattgtgccgaaatgtaccagaagtgaaaaggataaaggaagttacgctgggcttgtaacagattcaataactcatactcctataagttatgccagaatagagcttttacaagagggtgcgctgattgaaaccatcttctctgacgcgaatggaagcttcaagggcacaaaaaagaagccgggaagctatacgctttgcgtttctgctccgttttataatgagagtgaatccaggataaccattgaaacgggaaaggacacaacgtttgaaattgctctgaagcccgagaaagtttcgaaaagcccatggacagccacggttataagtgcagaaagcggtgaactcatcgaaaacgcgaagcttgagattattctggacaataccagactcgcagaaatccacaccgatacaaacggacacggcagcggtttgcttccggtgggaacgtacacggttcgcatttcccaccctaagtataaggcgcggacggagactattgaaatcgaggaaaataaaaccgccgacttctcatgggagcttacgccgacctccgaagaaacaggcgagcggatgtacggatacctcgaatgtccggctatcaatggctataacccagaatcaggtgtaggccgcattccattcggaactattgaattttatgatgcttcttcacagcttatatcatctgttaccgcggatgagaacggatactatgaatgcgacgtgccggaaaattgttactcctacaaggcttatggggaaaagtgcttaaaaagcgagagttcatatacgccgttattcacatccggtggatcctatgattttgaattgaaaccaaagaccgtccgcactcaccttcggctgagcgcgctcaacggatccacgatatacttggcttacgtgaaaattactgctgtagagagcgattatttcacggaagcggaattggtttattcggacgattattattttatggactccttttcctttgatcttccaatcggaacatatcagatttctgtcacgaatgctagttatttgagcgatgacgccccatataaagcggaggacaaggaggaaatttttaccatccgggatgataacgatatcttctacttgagagtattccttgaaccaacctatgtcatcgattccgatataaacgaggtggatttactggacgaggcagctctggttgaaccggaaatctccggcgaaaccgacctgacgaactcctccgatgtgttggacagcgatgtaacgaacggaagcgaaccgggtgaggacaaaaatgaaagcggcgagataagcgatggtggagccgaaaatgacacaaacgacgacgatgaaatcaacgtcagacaacccggcgacgacgcaggcgacgtgaacggtgatgatatgacaggcggcgaatccgacaatattgcagacgacgggaatggcgacgatgaaatcaacgccagcaaacccgacagtagtgcggacaacatgaatatcgaccgcaacaacagcacagacggcgataatgaggacgccagacatgaagctgacaccggaaacggtgacgataagaccagcgacgatatggagtgacatggatagtgcagttctcaaaaactcacatattgaagaaactggttaaaagaactagtattaagtaaagagactaaggcatattagagttatggtatgccttagtctttcgtagtttatacaagctggcaggtcgtaatatcctttttagccatagttttccatagtggctcgtaacggatcatattagcacctcttgcgattattagactttgtaaaatgataattgaatatactgaatatattcagtataatggtgtaaaggtattgatgagaggaagaaataaatggtagacggagaatttcaagattcacagaaacggtggctagaatacaaagcagcataaagcaggtaaaattcctacattgagtgcagtatgtaatgcaattacttttaatacagcaaaatcgcagcctttcagggattaatattaaaacaagacaaaagtaatctaaatacgtaagacaggagcgttagtatggaaatattcggaaatattatagtatcaataataactgcatcattgacatttataataacgcgttacgagatatttaaaaaacgtccaactaataaactcgagatatcctataataaattctattatccagctcttgtatggggggaagaccttgattttacttatactgcttatgacaattatgtgagccagattaaggttagaattaaagcgtacgataaatatgttacggaagaaaccaaaaagctatttagtaagctggaggaatcactggtagatcataaagataccgtagttgcttatgaaaaattttacaaagatattaagcgcaataatcaaaagttaagaagtgaaatagggtacatagaacctaattttattgaaaaatttattgcaaaaagtacaactgagaaattctcgacagttcttcctgttatttatataacatttgcaatattgacatatatctgtgttatggttttcggaatggaaaataggtttacgcaatattttgttggtataggtgtcgctattttgtttatcttggcaatagtttttgctgtagttgctattaaagagctaattcatgatttgaaaatttttatcaaaagtaaaaaggtagttcatagagttagaaaaaaagatttatataagtataaataatagtcatccttccaatcgattatggtgttcttataactggatttttgctagaatcactcatatgcagaatgcaaagatggtgcccaaataataataacgctttataagaatagctaagatgatgtgccacaatatttgacaggtgtgcactggaatattggaatcgaaagagggaatggttaaaaagggaaattgccgatgaaaattatttttatattatatgttcacatcaaagcctggctaatgacttcattgccggaaatcattcaagaggtattatcaacagagaggctgtacgcaaagtattagaagaacggaattctctgcgtagaaaaatcctattttgtataaatggtaatgaccatggggatgacataaaattgattaatggaatatattactattcgttaaattctgcatcctatatttggcatggagtgaagcaaacatataattacagcaaagatataaaggaatgaatggacattatcaaaatattacaccagaagacattggaatagccgatacatggaatggtgtttctatcaaaccagagacatcttcacttacaatagcagcaagtagtgtttgagtgtacacacacattactcaaatcacttgctgatttatttacaggacctcaaataccccttgcaggaacgtttacgctcctcacggaactgactttacggttagaagataccaaatagggcaactataccctcacacccaaaaaagagaaggacctctatcgttgtatatactggttggaaaagaaagtttgtggtgaccgacttacccaaatgctcagtaaagaaatattagttgttgaaaatcacttataaagaaaacctgatgtcatgcggctttgcaggctttcctataagaagccatgagaagacttaagctgctttttcagtaatcgtatagatcatggaattggaacgagaaataaataatgaaatagaaaactccggaaacggtttaaactttgctttcggagtttttatgacgttaagaagttcctgctggtttcagcgggaagcagtgatgcagcagaagcttatcttcaatctcagtcatcgctgaaaaaaaagattcggagattctctgggcaatcagttccacattttgactgttcacgtcagaaaccataatgagatattgacagctgctgtactgggtgaaaacgtcgccgagacgaagcgaatgctgaattacagattttaaggtatctatctgcttctcacgggttagcagctttggtaaatcaccatttttatcagtcaaagtaaagagaataatgtagacgctctcactgcttcggcgtagtctgcgttctacaaagcggtatattcttttgaaggtctcataatcctggcagtatgcgccggaaataagctcctgctctgacaattcggagcgaatcagtgccatatcgatatcgatgctttttctggcggcagaacggcgctgctcggccgccgccacaaccggtttcctgtcttttttccgtttctccgctaaaagaagctgatcagcgcggtcaaacagacttttgtaatcatccccgggctgatacagacttccacacacagtggcggagataccattgataagcggattagtcatttggatacccaaaaggcggattcggatctgatagcaccgctcatcgataaaattctgattctgttcgagcggcatatagatcacgaattcatctccgcctatccggcctaaaatatcctgtttgaaggtcatgaggttcaggattctgacgacctcctggagaacacaatcaccggcaatatgaccatatcggtcgttgatctgtttaaagtgatccatgtccagtacgaaaaggacacctgtctttttttcggacagcagctgattgatcttagtctctgtagcaccacggttataaatgctggttaaccagtcgtggttggccagtttacttagttttttattttcctcttctaaggctgctaaatcctgtttcatatatgtattcctcctgtttctatgctttaatcatacacataaaacccatgataagtcaagaatgtgacgaaaaataaattaaaaaggtaattaaaacgaataaacggcaaaaaaataatcaggatggcagctatttttcctaatgcttcggattataataaagctatatttaatctaaatttagtaattattagaggaagcgcagggaggtaagaaattggacgaggaagtagatcagatgaatgttgattatgaagcagaatttgatgggcatagcttgtattgtcattactaaagaaggtttacctctctaacttcgttatagcataagttctttaagtaccccccccaatgatcgcaatgatacccgtcccttctataatacaggcatttgatatgcacattcttatatcagcgcgtatttatgaatatatttatgatagtgaaaatggtcaccgcgtatggtataatagctatgcggaggctttattggacgaaggtgcggcatgtgaatgggtctgtataatgtcgggtgaaagaataaagcagataaaaggcgagatgggcgagaaaggggtatactatgaatctggaagaattcgtgcagcagaaaaatgattctgaattatgcgaagcatataaagaattacaggtgatgaaagaaaccgggaacagaggatttcaaataatgaaaatgctgatgctgtgcaaaacatctttttcgtgttccgaggctgacatgactacagtcgaaaatgcagtttgttgcgaaatggcgaggcggtattatgatataaaatgtaatagttaagagaacagggactgtaatttgtaaagacagtaataatggtataaatgtttgattaatctgagacttgaaagaacaggtaaatgcagcatggaaaagaatataagtgcaaatgatttttgccgttttatttggaaaagttatttagaggagcgcaggtatgatcttataagcgattttatctccgataaaatcagcattataggaacgggtgctcatgaagttgaaagaaatttacaggaatttattgctaagatagaagaggaaagtcaagaatggacagggcgttttatcatccgggatcagtggtatcagacaactgaactttctgattcccattctctcgtgatgggagaactggctgtaagagaagatgccgatgaagggatcctgtatgatatgtgttttcgattcacaattgtgctggaaaaagcggaatgtggctggaaaatagtacatattcatcagtctgtagccgatccaaatcaggcgagtgatgaattttttccccatcatatggtggaacagacctatacacaaattgtgtataatctgagacacgattctctgactggattattaaaccggctgtattttaaagaaacctgtgagcgctttctgacagctggggatagcggtgcatttttaatgatagatatagatatgtttaaaaatattaatgatcaatacggtcatcctgccggagataagacgttgatttcattttcagaaagcctgaagtcggtaattacaccgaatgccttagctggtcgtgttggcggagatgaatttactctgtttttacctggtatgaaccataaaggggagatggaaggtttcttcacaatgctgaatacagactggggagaaaggcaaaagttactgcaaatgcatgaaccggtctccattagtgtgggggttacgtttacttcaaagggaaataattcttacggggttctattgaacaaggcggatcaggcgctttatcttgcaaagacaaataagaatgctggacttgtgcattgggaatttcttctctaggggatctggtttaaaagaaaagatggtgctgatgcgatatttgatcagcacctttaattgtagataatcaataaaataataaggcagagagggattatttatgagaagatggaaaagtacgttacttataaccggaatcctgatggggttcgcagccattccggcgtatgcggcaggatggcaatggatcgacggcaataacgatggtgtcagtgaatgttactatatcgatgatgaagggaaaatgcttacaggaactacaactcctgatggatttacagtaaatgaacagggagcatgggttgagaatggagtcgtaaagacgaaagaagagaaacaaatcgtgtccgcatattccagtcttaataagcgatcaatgaaaacaagtcagatggatgagtttcaatattacattttctcaccagaaaatgcaactgaaaatatgccgttaattgtatatttacatgggcatggacttggggataacatagatgatttaaaaaatgaaaaatattttgctgccttgcgggaaggaggaaagcggggatcatccgcttatattctggttccttatctaccgccggaattggatcatggctggaaaggtatgtggccaggtatcgaaccgtctattatggaattgattgaatctgtagcagatacttataagatcgattgcaataaaatcagtattataggagcgagtatgggggcagatgctgcaatccagattgtttcctctcatccggataccttttcctgcatggcaggcgttgttccattccattaccaatgcccgattgcaaaatgggaagataactggggagaacagctaaaaacagttcctgtgtggctttttgttgaggatcatgaaattgctttaaatatggccgaatcggcagttaatgcgattaatgctgctggcggtcaggcgtggctggatatacagcatggagcaaaccatggggatgcaacaaagcgggtagcttcctgtatgaattccgggcaatatgaaatatatgattggctaatttctgtcagtaagtaaaatagtaggataccatctggaaaatacaaccttattcattattacttcaggatcatttccaaaattaattttgacaaccgccccgcggcttgatataataaaatcagaaattgcgaatggcttcggccgttcgcatttcgtcgtttaaggggatatgaacagattcgttcatcttgggaaaggagggaagttgagggcagatgtaactacattatgaaaatataaggaggcaggtggtactacttctatgcggatggtttgatggccgccgatacagacattgacggttataaaataggacctgatggagtctggaactcttaaatatacttattttcctctttttatgcggaaagctctaacctgggcggttaggcatgctttccgcatttattattttggaggtgaggcagaggaattaccgccgccgtccgattgccgggtttattgacttttttccggaggaggggtaatatgaaacaaccggaagttgtttgattccggttcagaacccaggcgatatacaggaaggaagcagataaatggaaggatctatattggagcgctataaaaacatactggatctggtgccatgcggcatttgtcaggtggcgctggatgatgatctgacaatcttatatgcaaatcggttttattatgatatttatggatatactccgcaaaatgcggaagaacagggatttataaatgtcaggtttatactgccggaagaggagtatccggagatccatcggaaggtactggattatgcaggtgccggaacaaccaaatttcagatggaattccggggaaagcaccgtactggaaaagttttatggctgctggtccagtgcacctataatccggatacgcctgagtatatactctgttctctgatggatattggcgaccggaagcggatggaagaggagatccgtatgagcatggaggagaacaggattgcctttgaacttacgaataagcaattgtacatttatgatattgaaaataaaaggctttttcagccggaatcagccgcggaagaatttggtcttcctcctgtagccggttattcgccgtacagtatcgtggagtcgggggttattgcagaggagagcagacaggagtatattgatttttacgaatcgatgatcgatggagatccgagaggatatgcggtagtcaagaaaagaaaaaaagatggaaccttcggctggtattcagcaaaatccgcagttatttacgatcgtgaagggaaaccgtgccgcgcggtgatatcctgtgaaaatataacggagcagcgggagaaggaactgacttatcagaagtggagccagtattttaaatcacaggaaggcaagacaatcggatattatgagtataatctgacgaaagacgttgtggaggcgggagatgatccgccagtatatctcaaactgctgaataaatatacagagactgtccgctatattgcagaacgctttgtctatgaaggagaccgggcccggttctaccatttttttaacagagacaggatgctgatgcgttattacagcggacagacggatggaacgattgattatctcagaaaaagagaagatgggagtctgtactgggtccgtgcaacgattcagctgattggggatccttataacaatgatgtcaggctgtttatgatgacgctgaatattgatgaggagaaaactgagagcctcagactgcagcataagatggaatgcgacggaatgacagatatcctgaaccgggatacctttatgaccagggtaactgaaattctggagaagagcagtcctgacatgcgccatgcgctgattatgctggatatcgatcagtttaaactgcataatgacagctatggccatcagtttggcgattatgtgatcagggaaacggcacagatattgaaacggtttttgagaaagaatgacagttgcggccggattggcggcgatgaattcatggtcttcttaaatgatataaaatccgaacaggatattattcccagaattgcagagctctgcagtcttctgaagcgggagtatccggagaaaggcgaggtgtcctgcagtcttggcgttgttttctatccgcgtaatgggacgactttcaaagaactctaccggaatgcggatatcgccttgtatgatgtcaagagagcggggcggtgtgactacaaaatatacggcgacgaggaggaagaggagcgtcccccagaagatcttatatgaaaaaactgttcaagcaactgtttatgctgtataataaattggattatattgaaaaaacataaaaattcaacgaatctggcggtgataacaatggcgaaaaatctctcttgtccggtaactgatcccttaactcaatcctcaaggccaggctgtcctgaaaagatgcctggtttacatgcgaatatcaccatgcaggacatcatggaggcgattgcagaagcctacgagaatccggcagacgatgactttggcggcgacagctgtgcggctgagaagaggaaagaacatgcaaacttaaatttaatagcggaagaatttggcatgacaccgctgaaggtaagaaaactgctgattacggccggttaccattatcagagagaaatttacagcacccccataagccggaaagtgaatgatctttatattgaagggaagaatatagaggagatcatggaactgaccggactgagccgcgcctctgtccatggatatctgccttacagcaggacggtatataagatggaagaaggatcagcggcgtctgagcggatcaggcggtatcaggagcggaactatgcatgtgaaagactgcggacggcaattcatctgcaggagcctgaggtggatgaattgctgtggaataccatcattcagtttgaagggtatccattctgtaccagcaagggacttaagttttcttacataataaagaaacgcagggacggatcaaacagcggtgagatgttcatcagccggaaagaaaagtccattacgaaggcaacggtgatgattgcatttcataaggcattggagctgatggatgcggaagggagtgtatcggggccgaagaaactggggacattcggtgccagctatctttacccggtatttatcagattatttctgccggagaacaggagactttaaaactatgtttaacagcattacaaagcttatctcatgggacagcatctggaatccctatacatttaccgatgcaaaaatcattgtggcgagtctgcttctggcgatggctggaagcattgttttaactgcgattgtatgggggagaaaaagagcggcagtggtcttaaaaagagaaatgcttcttttctggctttttacgattttttcggccaccttactggccagaaaagagacggcagagccaaaaatcaatctggaacttttctggacgatccggtatgcgtggaaataccattccggaatccactggttctatattgttggaaatattgctctttttattccgctgggattcctgcttccgcttaacggaaagccgttccggtcctgtgtcctcacggctcttgccggctgtctgctgtccgtttcgatcgaagcgactcagctttttctgaaattgggattgtgtgaactcgatgatgtctttcacaacacatgggggacgttactgggctgctgtatgttcagactgattactcctgatgcggtggtgtgctcaaaaggaagaaaagtgatcaacattttaagcaggggactctgcgcggttatgcttttcggtactgtgataactttttgtatcctgatctggatgaatgcgccggtgaaatgatcaatttttttatttaaattgaaatagaatgaataaacggcttcgaaatgggaaagataacaatatcaacgaaagaaaaaagaaatacttatcctcccctttttaacatcctgttcgctgcaatgagtgcggcgggcggggtgtttttttgttctggaaataagttttataatttataaatttatatatagtaagaagggagtgaaaaactgtttatagttttcgctcccttcttaattgaggtatatatgttctttacacctgcatggatccgtaaatatttccttcatcaacactgcttttacagaaccagacgagtaaaataatccctcccacaagtggaatcatgggaagaaagacccaccagccgcagcggttgatatcgtgaaggcggcgaatttcaagagcgaagagcggtatgatagacgcgaatacataaatgcccgttaatacagcgaaaattaacgtgaaattactcaacagcgtcaatacgattgtaacgatgatgtgaaacgcgattgccagccaatatccgcgtcttgaagtgcgtcccttaaaattcgcaaagtttttccatattgataaatattctggcatggtatacttctcctcttttgtctgtatgatttttatcgcacaagttgtttatatcctagcatactattttatttgtgtcaaatacaaaaattaaagggtaaaaatataaaataaaaagcaaacagacagaagaatattcgcagattctgcaaaaatatggaaagagactagggccttttttctaaaaatcttttaagactcatgtaacgttccttgctgacaggaagaacctgaccatttagtaaggttgcctcatagcggcaaagggaacggatatatccggtattcacgaggaagcttttgtgaatccgctgaaagtcttccggtacagcctgttcatgcgccgccaacagcccgtatgcctgaaaactgccatttgtcgtgtagacagtggtccactgaagcgcggcctgcatatatatgatctcggatggatgcaggtaacggtgccttttttctcgatcgcgaaaatccagttttggtccatttgtcttaagggaatccagacgtttcataaattcaaaataatcggaatcactggtcaaaggttttgctgaaggtacaagctggtttaaggggatatcctgcgcatgtgagccgtggacatgggccagagtgatcactccgttgattcgtttccaaacgtaggtgcctcgtacatgagcatgcataacggaaccgtcctcgagaattgcagttacctggtagcgtccgtataatacccatacatttcgttcgtgaaacagcagatggtactcctcgtcagacagatacacaggaggctcttcatattctttttttgtcacttgtaaaaaagattccagaccttcgcaccattggaaatcgttcgatcctatccacataaaatctttcgccatgggagctgttgtaatctccggatttcggttatagaagcttcgaacattatcccgggtcatttggataatctctgattctgaaatactggactttcccatttgttttcctcctcaatctcgtaaaatcagtatatcagattcctatggcgtttacaagcgcgtttacaaggaaatgacgtcatattcaggaaaaaagtcgaaaaaatatactgtttattatgaaaaatatactaataattaatgaaattgacaagaaaaaaacaccatgataaaatttacaggaaggtgcgtaagtgatctgatttgtgatggaaatatctttcgtgctttcgtttaatgaacggttaatggaggacattgaaatgaatatagcagtttgtgaagatgaggaaaacatccgtaatttcttgttgagcagtcttaaagaagaactcagatgccgcagactgtacgcaaatgtgcagacttacgagagcggtgaagcgcttttggaagcgatgaagcatatgacatttgaaatttattttcttgatatttttatgccgggagtcagcggcgtatcagtggcagagacactgcgtgcgaaggattctgatgcggccatcgtatttactaccttcagccaggattattatgcggctggatttgcagtgggagctgtccattatctggtgaaaccattgaaaagagaagatatcagcgaggcttttaaacggtgcttaaaacaggttggcgagatggaacggtatattgaactgacaatcgaccgggaaaaccgccggattatgcttcctgattttatctgggtggaatcgaaagacaaggtatgtgaactgcatctgaaatcgggagcgtttcgaacctatctgcagctcaatgcactggagtgcatgcttgaagattcccgtttcctgcgatgtcatcgcagttttattatcaatatggattatgtgtccaggatggaaaatggcagattttatatgtcggacggagcagttattcctgtccggcaggcagagcgggggcgttttcgtattgcatatgaagactatatgtttgaaaaaatgaggaggcggtgaaatgaaagaagctttgttgctggcggtgggaaggctggtttgtacaacgccctggtatgtgatctgctgcgttcctttttatgcgcaccgacgcatcagccgcagtaaaatagcggcggtgatcacggggatcagcatgcttttttttgtttgtaatttctatcttcagtttcgttatgacaactttaagactcatggaagtcttgttttttgtgcgctttatattattttgatcgggctgtttgtgtggggattccacgtagagtttgcaaagcttttgtatgtgttcctgattgcacaggcgatttccactgcgattaactatatcgctgcaattatgctcaaaccttttttcaaagatatgcggatttctcttcatgcaactccggcctatatactcgccattttttttctaaccatggcggtatacccatttctctggtatttcttttcccaccagctgcgggaagcggtggaggaattgaaggatcgggattttcgattgctctgtatccctccggtgctgatctttgtgattactgtaatatttaacgatgtaggggttaatcccgcaattccgcagagccaggcgattgctatttttttgctgattactgcgtcgggcctgatcacatatttcctgcatgttcgtctggcattggatgccgtacggcggattcggctggaaatggaagtggcggcgatcgaaagccagattgcagtccagggacagagctatgcacagcttacacaaaacatcgaaagcgcacgcgcggcgcgtcatgatctgcgccatcatctggcggccatgtccgcttttttggaaaacagtgatatggagggccttttagaatatctggcagaatacagaagaagcctgccggtcgaatttgaccagccccagtgcgcaaaccatgcggtagatgtagtagtccggtactatttgcagcaggctaaggaggcaggggcagaactggatatcaaactggacgtaccggtcggcgcgggattccgtgatacagatctggtcatcgtctttggaaatctttttgaaaatgcagctcaggggattttccgccagacagcgggaaaacggtacataactgcaagatgcggaatggaacaggggaagctgattcttacgattgataattctaccgggccgggagatgcggaatataaaagcagcaccggccttggaattggacagtcatcggtgaaagccgtggctcaaaagtatcatgggtcagtgcgctttgaatttaaagaggatatttacaaagcctcggttttgatggtaatgcctgtatcagaaaaagtacaagaatagatttcggtgattcaaagatagatttcggtggttctgttgaagtgaaagacagaatctgtaatactacaatacggcgttactgcgagtcgagtccgcagaggggagaaagttatatgattgatgagcgtacaaaagcgattggcagtatgttttttatactgctgtgttatattttgtcctatgggattttgaatgcgctgttgagcggatatcacgcggatgcctgctttgttcagatgctgagcggaagctttttgctctatatgatttggaaacgggaaaagaagaagcagattaatttctttgaggagagcagattccttccatttcctcaaagctggaagcctcttggctgggcggtattgttggggatcggcctgaactgttttgtagggggatttattaatctgctccctttaagcgacagtatggtgtcaagctacatggaagcctcctccgcacctgtacggggagtggctccggcaatggcctttgtgattatttcgatcattgccccttttattgaggaatgcctgttccggggggtgatattgaggcgcatgaggaaatccatggatgatctggcggcgattgcactgacttccactgtgttcggattgctgcacgggcagattatctggatcatgtatgcaattatacttgggatggtcttagggctggtttatgttctgtatgacagtatctatccggcgattgttctgcacatgagttttaatctggtatccggaataccgatgattttaaatcagcaggggcttgtttaccgctttacctatggtaatccgttttttctgtttcttatgatggcaggcgggtttacaggcgtggcagtaatcctatatcggatttactttaagagctttatgcagaaaactacaacagcaggcaggggagaatgaatatggaagtcaaaggaattattaaaaaaatattgatttatgggggactgtttatctgtgtttcgctggcggtcgggattgcgatcgagggtatgatcgtttatttgatggctggtatgaatggggagacggttccgtttttttcctggtcttatttcgctgaggccgatacctacaagtacggatttgggttaacgcttgcagcaattctgctatatcaggtattttccaatcaaaacagtaaaaaagcaaagaggatgctgaaggggaaagcaaagggagtcgaatccgttctggagaattcccgctttatgacggataaggaacgaaatgagatattccccggatacggttttgctcagtccgctgaaaagaaaaaggatggggttccggtacgggctgtatatgataagaagaaaggtctgcaggtgaatctggcttctcccatgcacgcgttaatcattggttctaccggaagcggtaagacgactacctttatcaatcccatgattcagatcctgggtgcatccgatgcaggatcgtccatgatcatgacggatcctaagggtgagttgttccagctccattctggcttcttgaaagaacggggctatcaagtcatggttttggaccttcgtgatacatatgaatcctatcgctggaatccgctgggcgatatctacgaccggtaccagctctacattgaggccggaaaaggaatctacataaggaacgatgcaccggaaaattcaggtctggagcttcaggatgatttggaaaaattcggtgaggagtggtacgagtaccagggacaggggtatgcggaccgcagggagctgattaccgttgttaagattaaaaaacagaaaatttacgatgagttatacgaggatttaaacgatctggttggagtgctttgtcccatcgagtcaaaagacgatccggtgtgggaaaaaggcgcgcgctccattgtaatggctacgcttttagccatgctggaggacagtgagaatccggaactgggaatgacgaaggataagtttaatttctataatctgaacaaggccatgtccaattctgagaacaattttgaagaactgaagaattatttcgctggacgccccatgacgtccagatgtgtgacattaagccgccaggttctgtcggcagccgacagcaccctgtccagctacatgtccatcgcttttgataagctgaacatgtttaatgacgaagggctctgcgctctgaccagcaatactgacattgaccccaactgctttgcagatgagaagacggctctgttcttaaagatcccggatgaaaaggatacgagacacggactggcttccatgtttattctctgcatctacaaagcgctgattaaaaaggcatcggccagagaggacttatctcttccgagaaacgtctattttatactggatgagtttggaaacatgcctcagattaataagtttgacaagatgatcaccgtagggcgaagccgtaagatctggtttaacatggttgttcagtcctatgcccagttaaacaatgtctacggggatacggtagccaatatcattaagagcaactgcggaatgaagatgtttatcggttccaatgatattgagacgtgtaaggaattttcagagctctgcggcaatatgacggttacgacggccagtgtctccaatggcggccaggataaagatatctctgtatccagccagcttcagacgagaccgcttatctatccttcagagctgcagaaactgaacaacaagcagagtaccgggaattccattatcgtaacctttggaaattatccgttaaaaactcagtttacgcccagttatcagtgcccgctttacaaaattggagcgatggatttaaccgaggcgcggagaaatgttttctttggcgacgaggtttattacgaccttggagagaggaaccgaagtgtgctgaatacggaagaaggaagggagaaagaggcatgaagagaagaagcgtgatagctttcatcgtctgtctgatggtgtacaccggttttggacggattgcgtatggagcggagagaatcgtttccgatgaaaagggaccgggaaagtccacggtaacgctgacagagacgtataaccaggaaatggggctttatgaagagcagtttgcaggaggacgccgttttgttacgaatattcctaatgggggacagatgtatgacgcggcctacatttcccttggcggaagcatccgcggaaagctggaacgcgacggcgtaagtattgccattcccgcgaacggttatctctacgatccgggttactatattcttacggtggaggcccagcaggtgggaaaatccatctatgagaccgccgtattttcattccggctcttaggacagcccaggggtgctgtcaataccgaagaatactctcatccgaagatcgtatgcggtacagaggtgacgagtgtggcgggaagagatggctggtatcgctttgctatgcctaactataaaagtgtgttttcctcactttcacagaataacagcactgtgtcctctgccaccttttacatcccgggaaatgtaggtgcatcccttaccagagatggggcagcggtttctctgattaatcaggtggagataacggctccgggacagtatcagctcaaagcatgggcggagagttatggaccggacaatgcgtgcccggtctggtacgaaacaacgatttcctttacgattccccagccggagtcggaggcagcagcggcgttttccagtctctttggttcaggcgggcagggagatgaaaaagaaaatctggagacagcggagacgctgagtgagatataccacgaaaatgcggacttatacgaggaggcgttttctaacggaaccgttttctatacgaatactgcaggcggcagtattacaggcggcaacgtctatctggatattccgtctaatatatctgttgtcatgatgaaggatggcaagcctgtatcgtttgagagcaaggttccgattaatgaagaaggaacatatctgttgaatctgtctaccggttacagggaagacggcgtcgtacatacgctgaccagcactttccgcttccgcattcagagaagccttggggcagcgctgcctgaagaggagaatatgtcggcaccggcggagggagaggaagtttccccggtggaatcagacattgacatgccggaagagataacggaatcgctttctggtgaatcggaacgtacgggaagtgaaagctatgatgcagaccgtgggatgttcctgcatcagtttaccgatggaaccagcttttacatcaatgttccgcagaacgctgtggtgaatgatgctgtccgggcagagctcccggagcaggcgactgcagtattgacgatggaggatggcccgtcaatggagtatgaatccggctcaaccataggggaccatgggtcttacgctcttaccgttgagacggcagggggagagaatgtgacatggaacttcaggatcattcttcatgcggtgaatgatgtgacggctttcacggcacccgatgggtatttgattgcaagtgtgaatctaacagacaaacttggcgaatcgagtgagactctggaacaagcctcttactcccttaccggggatggaacatacagctttattttgaaagggaaggaagcagggctgccggagttgtttactgtaatcattcaggacactgaggcacctgtcgtcacctttgaaggcgtggacgataagggcaaggcaaaaaaaggctcattttcctattcctgtgatgaggagaatgtatcgatttccattaaaaaggggaataaggcggtcaacacgctgggcaacacagtgaagggctcgggaacgtatacggttacggctgtggatgccgcgggcaataccagtgtctatcagattaaggcgggagttcacctcaatatgttctcctatatcctgctggtgatattggcgatcatagtcggaatactgattatattttattcggtaaacagagatcagatgaaggtacgataagcagacaggaaagggagatgacatgcagatggacagagtgtatatgatacctctcggatttaatttcataaagtggctcggagatcatctgctgaagccgatcattgacgcgattgtcaagattctggatcccatctttacgggatttttggatttccttggcgacatgatcgtaaagatgctggccggggtattttatgctatctatacatcgcttttgtccatggtagatttctcacagacgatttttgattttctgtccggtgcgaggaaggtctattcccctcagggaggctttgcactggaagactatatgctgaatttctttatcaactacggtccggttaagaaggcctttacagggatattcatagtcagcctgagtctttgtaccatttttacagttatcgcctgtgctcaggcggcggcaaactatacggatacgggcagaaaagtgcgggatgtccttcatgatctatggaaggcgctgcttacgtatatccttgtgcaggtgctggtgattgcaaccataggcctgaccaacaaccttttgactgtggtggataagagtatccaggtggcgtccatggataacccttccgagattaagtctgacggaatccgggtggctaacgtgatctttatttcaacgacgttaagcgctgcaaagaatacgacggctaccatccacgaccccctgaatgccgacccgtggaagagctattacacgggggcggcaaaatacacggatgacaatgcgctgaaaaacgattttgacgcgacgaaggtagattacgtaagcggatatctgtgctgtatttttatggtatttgtcatgttcagcgccgttttcctgtttatacagcgattttttgaggtggtgctgctgtatatcatatcgccgtttttcgtagcctccatgccgcttgacggcgggagccggtttagcgcatggcgggagatgtttatagcgaaatgtcttgccagctacgggatcgtggtgattatgcggctgtttatgatcttccttcccatctttatgggagatattgaatacagcaagaacagcacggtcaatgcgatgattcgtctgcttctggtattgggaagctgtattgcggtaaagaagggctccggcattctcctgcaggtgatcaatccgcaggcggcccagtcatccgagtcggcgatgggcagtctgacggccatcgccatgacggcgcgaagcgtggcagccagcggaagccatgcattccgcggcaaaaaataagagagaggaggagatctatgggaaccagtcagtatatgtatacgtatttaggcatcttcgacaaaattgccgagtgggtgttcagcgggatttccaaggcgatttcctggctctttaagactattttcgggccgatttttgaggcggtgctcaatccggtggccaacgctatcgtcgatgcggtaaaaagcgccatggccgatgcgtttttctatatttttcagaagcttctgtatctcatcgatacgattgaacgggcggccaagattttttctggagctgagtatgtgacctatgaaggaaagcagtggtccctgattaatatcctgatctttggagaaggaacggtaggccgggctatcaaatatatgacttatatagcggtactgttcgcgtttgtgtttgcgtttatctcgctgagccgttcaatctttgatttggagacagacaacagaaggcctatcggcgttgtactgaactactgtctgaaggctgtcatatcatttctcctggttccggtcatgtgtgtggcgggatttcagctcagcagcctgctgattcaggtgaccagccaggtgaccgccccgggaggcagcgccgtgaccatagcggatgagttgttcaggacatgcgccatgggggcatttaagacgggaaagggggtaggtgatttatctggcggtctgtggaccgacatcgccaatacgaagaaggtgctggaccttgcaaaggtggactacatcacggcctatctctgctctctctttatgatctggaatctgtgcagcatcagctttgtatttatacagagaatgtttgagatgattcttctgtatctggcatcgcccttttttgtggccaccatgacgctagatggaggagagaaattccaaagatggaaaaatacctttatcggaaaagcgattaccgggatggggacgctgatactgctcaatctcttcctgatcctggtgcctttaattaccagtgatacgatcatcttatcggcaggagtcgccgagtcggggaatgcagctcagcaggcctacacggcgcttacgaagcttctctttatcctcgggtctattatggcagtgaaaaacggcggctcactattgacctccatcgtcgatgcccagaccggctcggcggagcaggccgccagccagcagacatcggccatgatggcaggcgccctgctgggcggaacccgtatggtgcgtggcggcgcggccaaatggtcggccggtaaggaacagcgaacgatgaagagggaaggcaaggcgtttataaaaggggagagggagtataagaggaatgagcaggcagcctcggccatgcaggccagaggcgatatacagggtgcttccaggcttcgctcactgaatgaaagccgccatacgcgttctctggtccgggctgagaaggccggactgggaactgcttccagagaccgcaccgggaaggtggtcagcaatgggaagttccagttaaagggcggcgaacagatgaaggatatcaagaagcagcttaacaaagtaagaggaaaatccggtattatatataatctggagcacggctcaaagaaagtggggcagaagattcataatctgcaacgtgacctggatgagagatccgagatgtcagatctgagaaagaacaatgaaatgagcagcattgaggaaggatttgggtatcagcttaagtccattagaagcagttacgataagaagacagctaaaaatccaattatcgaggggctccgtaaaggcgggctgtccgtaggcggtggagaatcaccgaaaccaccgggaccgccgaaaccaccgggatcgccgataccgtcggaaccgccaaaaccgccgataccgccgaaaccatcggctccgtcgaaaccatcggctccgtcgaaaccgtcggaagcgccggaaccatcggctccgtcgaaaccgtcggaaactccgataccgccggaaccaccaaaaacgtcggaagcgtcgaaaccatcagaaacgctggaagcatcggaaactccgataccgccggaaccgcctaaagtgtcggaaccgcccaaaacgtcggaaccaccgaaaccgtcggaagcaccgataccgccggaaccacccaaaacatcggaatcgtcgaaacagaaggataaatccgatttgccgggaagcgatacgtaatgtaaaggataaaaaagaggtgaaaccatgagaattataccgaaaaaaacaaaagtgtccatcgagttctttaaaggtgtcgatatcattgacctgataataggtatgatcggcatctttctggtggccatggttgtgatgtcatcgcttccctttaagcttcccctgactatggtgctcattattatcttcggcgtccttttggttcccattgacgaagataaaaactatgaggctgttctctacattctccgctattttgcccatccgaaggtggtaaagagaaatggggaaaaggagagcggccaggagacggcagaggccaaaggaaaggcgaagaaaaaatcaggaaagaacgtaaacgtagaggatgtcatggcgtttacgggaattaagggaaatgaaatcctgtacggcgacagctacgttgcctccgtgatcgggatatcgccggtggaattccgcttcatggcggaaaaacgccaggattatatgatagagagggtgtttggcgctgcgctccgcatggttaccggaagtaaccggggcgcctccatcgtgaaggtggagcggccgattctctatgatgagaccatccagtatgaattccagaagatggagagcttaaaggaagcattttataacgatatcattaatgaggacgagctgacgacgagagtcgagattatctatgaccggattatggagattgaacgaatcaattttgacgataaggtctacgactcgttccactacctggttctctacgataaaaacagtaaatccctaagtgatatgaccaggtcggtccttcagacgctggatggcggcggccttcccgtaaagctgttagatgaaaaagagcttgcggtatttttaaaatacaatatgacgagagatttcgatgagcgggagatcgagacgctgaagccggaggagtataaggcgtggatcattccggaatgtgtggaattcgggacgcgcacggtaaagatcgacgatgtggtcacccacaacttaaagatcgtcaattatcccacagaggtcggcaatgcctggggacacagtatttttaatatggaaaatacgaaggtaatcatgaagctgactcctgtagaccgttttaaggccgtgcgtaatattgatcgctccattgacgagttaagggggcaggaagcgaatacgaacaaagagagccgtttaatcgagctggctggtcatattgaaacgctgcagaacttgcttttgatgcttcagagtgataatgaacagttatttaacgtcagcatctatatgacgctctatgattatgaggaaacagagaggcggcttgggaagaataaaacagagggagagccagttcaggtcagcgatatgaaacggcgtgtcaagcggcttttggcggaacagtcctttcgtaccagcgatatgttccttcgtcagtttgagatgttcgtgggttcccaggtatccagatatgatccttttgctaaaaaggccagaggtatacactccaactcagtagcagccgtttttccgttcgtgtacagccatatccatgacaaaggaggcttccgcattggtcattctgccggacttcccgtgtttattgactttttcgtccgtgacagaaaccgcgtgaacagtaatatggtcgtcataggtaaatccggaggcggaaaatcctttgccacgaagatgatgctgaccaatctggcggcggaaaacagcaagatttttattctggatccggaaaatgagtatacggctctggccaagagccttcacggcaactggattgacgtgggaagcgccacacagggccgcatcaatcccttccacattatcacggccctgaacgatgatgagagtggggaagaagaaaacaatgtaagctatgcagtccatcttcagttcctggaggagtattttaaacagattcttcccggaatcgatacggattccatggaatttttaaataatattgtgattcgagtctacgatgaaaaggggattgacgagactaccaatttaaatctccttgggccggaggattaccctacctttgatgatttatacgataagcttctgacagactatcaggcatcagacagtgattatatgaaaaaccacttaagagtgttaatcagctatatttcgaagttttccacaggaggaagaaactctcatttatggaacggtccttctaccctggatgtgaaggaaaacttcacggtatttaatttccagtcccttctggccaataagaacaacaccgtggccaacgctcagatgctgctgattctgaaatggcttgataatgagatcatcaagaacagggattacaatgagaagtaccatgccagccggaaaattattgtagttgtggatgaagctcacgtgtttatcgatgagaaatatccaatagcactggatttcatgttccagcttgcaaaacgaatccgtaagtataacggtatgcaggtggtcatcacacagaatgtaaaggattttgtgggaacggaagaactggcaagaaagtctacggcaattattaatgccagtcagtattcctttatcttcccgatggcaccgaatgacatgcacgacttatgccgtctgtatgaaaaagcaggagagatcaacgaaacagagcaggatgaaatcgtgaataatggccgcggacatgcgtttgtagtaacgtcaccggccagcaggagcagcattgagattacggctgacgacagcatggtgcgtatgtttgaatagagggaggcttcatgaaactcaaatggagaatgataacagctttggcgctcctggttctctccatgtgcgggtgtatgcgtcaggagacggaaagtcaggtgatacggctggccgtggagagcggcggagagaatctgtccgggctgacggaagaactgtccaaagcctggaaccgaccggtggagatcgtctctgtggcagaagaccggttgtttgatgagatttctcagggcaactgtgatgcgggaattggcttgccggagcgcgaagagagaataaagattggtatctggtcactggctgtaggagagcctgctaacgctgtggtgattgggaatcagccataccggtacagtaaggaactggagggaaagaagatcggttatccggctggatttccggaaagtcagctggttctgtccggaggattacagctaaacagttatcagaacagaaattccatggagcaggatctggtaaacggcgtactggatggaattatgctggagggatcggatggagaggtatttatggaggaacacagcggcagcggttatctgatctctcaactgaaggatcagccagtcctgtccagatatttatacagcagcagtatggatttgatacgtttggcagcaggcagaaaaaagggagagtgacagacaatggcttattttgacgatccggagaatcgaaaaaactgggagagagaacttcggcagatgaaggtggaaaaggcccggcgtgccggaggttatgagagctcggtgaaacgggcggaagagtcttatcgcagagcggttacctttgaagaactgatggccatggaggggatcggtaccgggaatgctgtttctaagaagagtatggaaaaagggttggaaaagcagaatcagatagaaggacgaactttatgaaagggcggggcattttttttgtttccgtgttcagtctgctgacagccttcaacgcttttgcacagacagaaacggtttcgtcctctgcagtacaggatcatctcgttcagggctatgattctgcagctaagatgtatacacagacctttgcgaataaaaaaacgttccggacaaacgttccgaaccgtatgataaccagccgcagtgtagtgatggagtttgacactggggaactgatttatacgctgacccgggatggggaggcgatggcatacgagtcagggcagattattactgagccgggctactactgtctgaaagcgatggcacttccggagattctggcagaagacgttccggaaccgacgatagaccagctttatggcgaggcggcaatgccggagtttactttatatgaagatgacaatgtctatcagagctgtttttatttctttattccgggaaaagcagagaatcggctggattatatcaatgcaccggagggatatcagattggatatgtggaaaaaaacggacagcgtgtacctggagattcgcctgactggcagcggctgaaagaagatggaagctaccgttttttatggaatccggtaaaggaaggactgccagtctgtgaatctgtccttgtgcgggatacgaaggcgccgttcctggagatcgatggtgtaaaggatggcgggtactcgaaaggaggcatctccgtctatgccgatgaggcggacattaccatcagggtgacagacggaagcttctcctggaatttagacggttctaaactggaacggccggggatttatgagattacggcagttgatgcggctggaaaccagagcaggtacggagtcgttatagacatggatatgacatgggcaatggttctggctggggctgctttagcagcggcaattggtgcatgtatctggtatattcatgttcaaaaaaagaaaattcaggttcgatagcatgtagcgaacacttaagcggttcgttcacatagattaaaatttaaaatacgaggaggaacaagtatgtttcaaaatttattcacgaaggtaatgatgcaggggcggtttatatttgcagcttcaactgaaggtacaaaggcaggtacggtaccggattttacggaggcggtgaaaccgattgtcgatttcattaatgccttaaaggggccggcgttaactgtcgtgattgccttagcagcaatttactgtataattctgggcgcaaagtttgcaaaggcagaagagcctcaggaaagagagaaggcaaaggctgctttaaagaacggaattattggttttgtccttatttttgtacttctggttctgttaagcggagtaagcggtttgttagtaaattgggtaagtaagtaagggcagaatagaggtatggcgcaggaaccctgcgccatacttgctaaaatacgaagactgaggggacgcagatggagattttaagagagaaaaacggacagaaagaagtagttacattagttggaaaatttgacaccaatgcggccgcagagatggaaaagatactgcttgactgcattggagaaggtattgccttagaagttgagatggctcaggccagttatatctgcagcgcagcgctgcgtgtgtttttaaagacccagaaggaaatcaataagcttccgggaagcagtatggagattctgcactgcaaccagggggtaaaggatatttttgaaattaccggattttcaggaatcctgacgataaaagaagacgaaaagtagaggaacaggaaggaggcggaggtttccatgaaaaaaataacagttcagatgactgctgtgatatgtgcactttctttaacaggctgcagttctctgtttgggatggccacaccgccgccgccgtttccagatgattttatgattgtggatgggtccggcgtggatttgtcggaccctgcctccatccaggctgcttatgaccgccatatccagtcacttatgcaggccgattacgtggggaatccggcgttttccagccagatcagcgagattgtttcagcaaagccggaatggtccagaaacttccagaattttcaaatcgtagattacgatatggacaacgatatccttgtctatgcctatcagaccactctgctcgcccaggacggggaggactacagcgcgcctgcggtggaggtagcaccggttgattacagcatcgatacaaaggtgaagaaagaaaacgaaaagctgatagagcgggactctaaggtgaaggaggaatacggcggggcggtcagcgatgataagaaaaagctgatcagtgcagtgggaacctaccggtggaaggatgacgatggaaaggtattaaaagagagcacgattttctgggataccgatgttccggccaacaaagctgttgtctcggagctgggagtgggaaataagaacctgattgtgaagctggcggataacgggcagttggtcatctgctataacgatgagttgcttttctaccagtatggcgatgttgaggtcaatgtgacgaaagacggggcggtgacaaaggagatcaggaagacgtatactccggtgttaacgaagaatgcaggagaatggattgggaataaggaatctgccctggcctttgatatcagagcaattaaaagtgcggccaaaggaaaaggaggccttttcaatgagattgtcagctatgatgtcacatataagcttgatgcggaagacgtaaagacagcgaggaataatggagtcgaggctcagctttatcgaattatggatgaatttattgcagagctggatgaggaaaagatgaaagcggagtgggaacgtacgtatgatgagactttaacgaaaacagagtccgatggcggcaaaactgttaacatcacggtgtatcccgattacagtcggtatctgatcgaagccatgaaggagtatggcaaaaagaatgggtatgagatgacgcccggcagctggaatccggataaccgccggactttcgaggccgcttttgtatatcatggagtaacgtatcattttaaagttacaggaaaacgttcgcaggtgtcttcggagctggccgcggatcaggagataacgctgaccgatatggagatatatccgactaagaacacttatcagctctatgatgacggtgatcagcaatatctggctgtttttcaatttcgtacagaagaaaagaaaagtacagaggaaaacgtggaagcaggcccggacagcaatgcagatgataccgcagattacagtgtggatgaaaagatgaatgcggagaatccggcgttttatacagtcgctgccgctattttcggtgctacaagagataagtatatggaaagcaacatttccgtgattcagatcaccaataaccaggatatgctgcaggcatttaaagaggagagagagaggattcggcaggagattgcagccaggcgtacgtcgtttcaaacggaggtaaaaaccggagcggacgtccaggtatcagagcgcaatgtggaggatatttctctgattctcgataaatgggacaagatttttgagctgcagcaggagatagaggaaaagagcagcgccctaaaggagcaggcaaccgcatcaaatgcagaaaaaggagaaggtgacagctctgaagaagagaaagcgttaaaagcagaaatcgaggagctgcagcaggaaataaccgctctctttcaggagattacaacggctccccggtcggtgaagattacatacagggataccgtgatgtttcagccgaataagccggagaatatggttatgacactaagtggggaagcggtggaagcacttcggagcgccgcagggctgtatgaggagattcaaaggacgcaaggtaagcttgataccagcttcgaggcatttagagaggcatataacagtgcgttgacgccgtattacagtgcggcactggataacttatggctgaaagagcaggagatggatgatgaaacaaaaacggctgtagagttccttcgccggacacttttggaaactgcgccggacagcgagacattgaaagatatttccgcagttttaaataacagagaactcttagactggctggaacagacggaaagaaatctggcacaggcttccggctttgcagagtcagttacctatcccgccgtagaagcagtgatagatgggcaaaccgtgaagaaagatccatacagggatggctataccgtttatatggataaggtaactgcaatgaaggagcatttgaaggtaatgacagaacagtcccagcttcttgcagaagccagaaaatcactgggggagctggaatctcagattaagctggaacgtcgtgatgatttgacctttgataatcagcagtcatttcttttaaaacagtgtgacaggatgcaggagctgattcagcaggtaaaccagggcgccaatgacaaggtagtaaacgatgccaaaaaggaacttaaggagactgcatggaaaatcggcttatctccgggaattggagacaactcggtgcttaagctcgattcagcactgctggcaagagcggtctatctcaagaagactgtggtgcagcaaattgacagcggaaagaatccctacattctaaaccgcatcagccactccagggtggctatgacggatggaaactatgtcacactgctcaatttcaaaaatggtgatatagagacaaataagtttgataagactgaggattttaaaaattacagtctggtagaagactcctgtatgggcggtggagagggggcagtctatgcaaacgcggataccgattataagaaaaaatgtattgttgatattaaccagctggtagggactgaactgcctgccgcgggagggtcttccgtctaccttatgtacagtggaaccgcactggcagatgacagactgggcagcaccgttaattttacaaaggggaatacgtatgtttgtatgaattctcttggtaaaccggcagataccgtatataacgtatccagctactcattttattataaaagagcatttctcgagtatgcaagcagtcagaaagttgagaaaaaagaccaggaaaaggtcagtacaaacttagatgtcgaaatggatgagctttatggaaaagccaaagcgacagaagagttaaagacagacacagagtttttaagtcaggagcacacgattattctgcctcagaagaaccgctatgacaatgacatatattttctcaatatttcccttcaggaaggggtagtgttgtataagtactcgaaagcctattcgacctctgtacccaaaatggaggtggtcagacggattaccgacgaaatgaattacagaggaggaaagatgggaggcagctacttcagaggctggctgaaagagaagaaagctgatggagacagtggaaaggttacgggatacgacctggttctcctgggcttcagcaaagaggatacgctgaccgaggtgaacggagtgaaggagtacagaagcattgtgccggatgatatttatcaggcccatctgtataagattagtatccctaagccgtaatagaatcatggcgtcaaatatcggattggagagagacgtatggaaataataaaggaaaaaaatggcacagcagtgacgatgtcccttcagggcaggctggatacggctaccgcgccgcagatggaggcagaactgaaaaaagatatggaggaggtgacccggcttattttagatatgcgggagcttgaatatctttcttccgcagggcttcgggttattttaaatgcgcagaaaatgatgggtaagcgggggggcatggtggtccgccatgtcaatgaaacaattatggaagtgtttgaactgaccggtttcagcgatatcctgacgatcgagcaggaatcataagcatggagatgagatttcatcatgaataaggataaatttacagggccgatgtatttcaaactgtggtggccggccatgttctcctccgtgggctgggcactcagcgatatggcggatgccgttgtagtggggcagaagctgggagcaacggggcttgccgccatcagcctgattcttccggtctacatgtttaactgtatgatggcccatggattcgggctcggcggttctgtgcggttttcaacacttttgagcaaaggaaaggaagcagaggcaaaccgtcacttttcagcagtgctggagctgtcgatggcgtgcagcatcgtgacggcagcgctggggattctgtttcttgaccagctgcttgcgtttctgggaactacatcttcagacgggaaactgttttatgcgacgaaggactatctgtttatcctggttctgtcaacgccgctgttttatctgtctaatattcttaattattttttgagaaatgacagttgtcagaggcgggctgggattggttccgtcatcggcaatatcacggatattggcttaaatatcattctggtattggggctgggactggggactgggggagcggcgctgtcgacctccatcggacagataattgccattgcggtctatctgccggggctgtatgggaaggagtctcatctgactcccaaactgctaaaaaggcttccggtgaaggatgtgatgaagagtctgcgttccggctttgccacctcggtgcagtatctgtatcagatggtgtttttctggctctgcaacaacgttctgatgcggctttccggggaaaacggtgtggctgtattcgatctgatacagaatacctcttatctgattctctatctctatgagggaaccgcccgggccgtgcagccaatcctttctacctattacggggaacacaatgtaagcgggcgcagaaatgcggtgagactgggatttgcctcgggcatcgcggtgggcacacttctgattgcagcagtaatggtgtttccgaatgcgttctgcaggctgtttggcatgacggaagcagcgcttgcctccatggcggcggaagctctgagaatatactgtgcaggagccttttttgctggaatcagtatcttgacatgtaactattaccagtcttgtgagcggctgaaggcggtatttttgattgaaaccatgagaggagccgtggtgctgcttccctgcactcttttgtttgcgtcctgcggtatagagaagttctggctgctgtttcccgcgacggagatcgtttcgctgcttattttcctcctgtggagaagattcagccattacatcgttgatgacggtgacccggagcgggtattccagtacaccatctcaggaagtgtgacagatttgactgaggtatgcggtcggattgaagatttttgcgtcaaatggaatgccagcgccgggcagaggtattttgtggtaatgacggttgaggaactggggatggcgattttgacaaaaggcatgaaggaccgtgatgacgggtatattcaaatcacggtaatcgctgccgaaaacggaaaatttaaactatatttaagagacaatgcatggaagttcaacccgtttgagatggagacgaaacgtgcgaattcagaggatgaggtcttcatggattcgatgggaatcctcgttttgaaagagaaggcggaggatttttattatcagcggtatcaggggtttaactctcttgttctgacgatatagcagagaggtgtgaaagttgaagattgtatattttggaacagatgtttttctgccgtgtttttcctattttgtgcgaaaccatcaggttctgtcactgtatacgtatcacaatgatgaggactgttttactgagtacggtatcgtgaaggaagcagaaaaatacggcataccggtgcattacgaggacatgacggcggctgaaacgaaaagactgttcacagaggagggctgcggactctttttctccgcggaatataaccggattctcccgttgccggaggatgtgactgcctttcgcggcattaatcttcacagctctcttctgccggagggcaggagctactatccgattgaagctgccatggaacgggggtttttggagagcggtgtcaccatgcataagatgacggctgccctggatggcggcgatattctggaccagtccagtgtagaaatcacggagggaatggacagtatagacgtctatctgcggtgcagatcggaggcagagcggatggtacaaaaactgatggctgacttcgagccccggtgggcggcggcccaaaggcaggaggagccgaaaaagcatccctactggaagcggccctcggatgagaagcttacgcttactcacgatatgacgaaatcggaggcaaaagcgtgttttcgctgctataaccagatgacacaggtgaagattcatggaacctggtattacgtgcgcgcactggatacgggagagacgaatctggagcaggatgtaatcgcagtcaggaaggatcaggtattgtttggcgtgtcggatgggcaccttcgtctgattctttgggagagaaagtgtggtatgccggatgaaacgtaaaaaaatgaaattccgtctgcagcctaaattgatcatggggctggtattcatggcagtggttctggttctggcgcttacatcggttgtagttgtagtgtaccgggggcagatggaggaacagtatggcaaggtggccttcgatgaagccactatcgcggcagagatgattgatggagatatggttgaaaagtattacgccacaggtgaaaaggatgcgtattacgagaaagtcgcagcggctctcctgcgcgtaaagcagaccatagggctcaaatacttctatgtggttgtccccgaggaggatgtcatggtatacatctgggatgtgggggaggaaggcgaagagggtgtgcgcaggctgttggatacagattcctattatggcggcggcaacgaggttatgcatgccgcgttctctgcaaatgcgaagagaaatatcctgtttacgcgaaatgaggaatacggttatctggcctctgcctatgttccgatctttaactcggctggtgagccggtggcgctctccagcgtggatatttccatggaaaagattaaccgggatatctaccggtttgtatggacagccgtttccatagcaggccttgccatgtttgtatccatcatcgcatattactactacattcgacgcattgtcatcaggcctgcggaggtgctgcatgatgccgcctctgcgctgattaaaaatgacatggacgatctggagaacttttcgatcagcgtaaagacgggggatgagtttgaagaactggcggatgccttccagtttatgacggtggagctttcggaatatattaagaatctgaccgtggttaccgcagagagagagcggatcggtgcggaactggatgtggcgactcagattcagtcctccatgctcccctgcattttcccggcgtttccggaccggagagagtttgacatttatgccaccatgaacccggctaaggaagtggggggagatttttacgatttctttatggtggatgagaggcacctcgccatcgttatggcggatgtgtcgggaaagggtgtgccggctgccctgtttatggtaatcggcaagacgctgatcaaagaccacacccagccgggacgggatttaggcgaggtgtttacagaggtgaacgaccttttgtgtgaggcgaacagcgaggggctgtttattactgcgtttgagggtgtgctggatttggtaacaggagaattccaattcgtcaatgcaggacacgaaattccgtttatctgtaaaagcggcggtttctatgagccttataagatacgcgccggatttgtgcttgccggtatggaaggaattcgatataaagcgggaaccatgcagttagagccgggggataagatattccagtataccgatggaattaccgaggcgatgaacagcagaaatgaactctatggaatgaaacggctagaagagactttgcggaagaatgtccataaggcgccgatggagctgcttccggaggtaaaagcagatattgattcatttgtggggagtgcagtgcagtttgacgatattacgatgctgtgcctggagtacagggcacggatggagggcatatcttgaaagaattgacgatcagtgcaacgattgagaatattgaacgggtaaccgattttgtaaatgaacagttagagagcctcggatgttccatgaaggcccagatgcagattgatattgccattgacgaactgttcggcaatatcgcccactatgcgtaccaccctgaaaacggatttgccaccgtcagagtggaggtgatggacaatccgatggcggtagtaatcacttttatggataacggcgttccctacgacccgttagccaatgaagacccggatatcacgctgtctgcagacgagcggggaatcggcggtctgggaatctatatcgtgaagaagagtatggatgaaattacatatgagtataaagatggaaagaatatactgaaaatcaggaagaacttttaagaaaactgacgaaaaatacatggaaagtacggaggaaaagaatatggaaataacggaaaacatcgaaaacgaagctgaagccgccagaagcccgggggaagtgaaaaaagagatccgcaaactgcggcataaggcagagcgccccctctactggatcttgtttgtgatgaatattctgattttgctgtgtgcgtttgtctttaccatggcaatgcagagttcagatctttccgggtttattgacgatccggatatcatcgaactccttcagaccatcaatggcggaattgtctttttctatctggcttatgttatcattgcttttctctgtgcgttttaccagctctatgccagtgaattatcttatgcgattaaggtcactccgagaaatttcccggaaatttatgagaagagtgtggaattttctaagaatctggggatgaagaaagttcctgaggtttatatccgccagcaaaacggcattctgaacgcattctctgcctgggtgattgggaaacggtacgtacagctcaattcggaaattgtcgatattgcctatatggagaataaggactttgatacgctttactttgttatggctcatgagtttggacatcactattttaaccatgttaccctggcccattccttcagcatcctgctcccacgcattataccgattctggggccgctttactcccgcagtcaggagtacaccgctgaccgggtcgcccaggtattgacagaatccacgggcattaagtgtatggctatgctgtccgcgggacgccacctctatccatatgtggatgcagaagattatctggagaacatttaccgccatcccaatgttctggaacggctgggccggtggattgtcaaccttaccgtagatcatcccattgctcctttccgcgttgctgcaatcgtggatccagagcaaaaaagcggacgtcttatataaaaaattatagaagggtggaataaattatgctaaatccaaatgaatatcttgacatgctcccgatgcttgcggagtttgcgaaaaccagaccagacgcatggaagaaatttgtggaagaaagagataagcttagtactgcaggacaatacaggggacttcggaaagatatgtatgagatcaagggcagtaatgttgaaagtatgctgtcaaatgtagtggcgaaagaattagatatacgaaacccgaaccggccgaataaaattgctcagatttctaacacgctttttgttacagcggacttatctatcaatagtacatatggggccgaggaggcaatgaacctgcggacttataagaatatggttaagagtatcagtggtgaaaagaaagaactggcggaattcctcatcgcctgttatgaagaagtgctgaccatgtcatttgcgtatgcggaagacgtcgacattagccaaaaaatgaatggttttgatcctttaggtgagatgacgagcaatctgggtgagtttcagagcgcagaaatgtgtttggcccaaatgtttattccgcttatacagggcgaggacatccagattcatcagattcatttggagcgggagaaaagcaaagggcaagacagtaatgaatatgaaagcagggaaatgtacagaaacagaatccgggaggagcgaggaaagattatttatgcggccgaccactccaacatcccagctgatgcaatggcagttgatctctttaattataatttagttttcgaaaaggtatcatcacgcccggagtttcaaaaattccgcggtattacagcggatcaattgtgcgactttgattatcgccacagattagctcaatcaggagagtacaggctgccagaccgcatggattttcagattaaaacgaatgaaattatcgatcctgccgcgtttgtggagtttatggaaaagaaaaccgagccagaaagaaaagcactggttgagttttataatacaaatagtgcaaaagcgaaaaaaggagatgatatataatatatatttaaatcttactccagtctgcctgaagaggttcagacaggctgtaaagctctggttggatacatggaatacggctcaacctggtataacgataatattggctgtatgattcagaaagagacgcatcagcttttagaggaagccggccttgactggacagatatgatttttatcggagataaaagcctccgtgagatcgtgggcagtcaatacgacgatatgccgaaggaactggcggagaaagaaaagcaggccagagtaacggcggcagtgattaaggcggaggagccggtatcctttggagttatggaaaaggctcctgacggaaaaatcagacttgcccgcgtgattcctgtgtatggggatgtccttccctttcagaagacggaagcggaaaaaacggcgtacaggaaaaaacaggaggcattgaatgcatccccggtatttgccgaacaggaggcggctatccggtggaaaatgaaggaatacaaaccggcttacagtaacgcatacacagagaatcacgtcaagccgagcggcagcgataccctgaaatatatgacgggcggactggacccggaatcatttaccagtatatggcatgggtatgtcccgttggcatttaacgagttgaacaagccgggtagagtaaacagccttaccaatgagatagaccggaaggcagcgatgaagtggaaggccctatacgatgagcagactgatccaaagaaaaaggatacggtcaaggcaatgtatgagcttcagcggtgtggtgtaagaagaacggagccaaccagaagccacggaagcttcttcgaatcgattctctatctgaacataaaggcgaagcatccggagtaccacatgagcgatatcatgtgcacagaccgatgtgaaaaccaggaacttgcggaccaaatcaggcttgaaaaggaagcaatgggccctcagatcatggcaaaaatgggaacgacagaaggacttgccgatgtcatgaaagtctgtatgaggacagtgtcggggcttgatctggggcgcgaagctgattatgcggcgaagattccggaaacactgacggtggaagaacggaaggaactttgtaagcggccggaatacgagggggccagggccggattcttcgccactctgggaggggccatacagggacttacacaggggctggaatcggctggaggtttcacgaaaaaggtacctcccgtaaaggtgacaaatgaaaacagagctgttttcaataagtatcctgaagcactgaagctgagggaaaaaatcggggagctgtcggtgcaggagctggcagagtttaaccacgccgtagaagccgtcattaaggtgtcggatctaaaccgcaataaagcacaatttatgggagatggaaaacgggatcagatctccgatgcagagctggctgcctgcgccgaggcgacgatcttaaatgaacagctggaggagagaggaaggattgggggaaagaaaattgctaccggacgtgccggaacgcttcttccgctggtggcggatattccttcgcaggaacggccgcgcatgatgagaggacatcttcctgaaacactgaaggaggcgtattttaatgacgaaggaataaaaaagaaactgacggatgatgcgatgggagcgatgccaaacatatcgaaggaagaagaatccgttttgcgctacttgtcgacgccggagtcggagcggaagttcaaaccagaggcggttccggctcatcctctttatgatataacgaaattcagcaaaacagcaacactgccggaagatgtagttatcagaatgcaggaagaaaacgccaaacgggcgatcgtaaccaatacggttttaacttttctggaagagcataaaatagataatccgggcgatacgagagactttagcggaatgatagatacaaaagggcttgataacgcacaaattgaagaaaagacaaaactggcgctggaggactattacagcggtgacccacagcggagaaaaaaggttctggatgaattctataaccgtgcggaatcatttgatctgcgcagcctggatttatcgctgcttactacaaatccgcccagggatccggcgaagagagcgaaaagtgcagaagatttagtccgtctatatgaagtcgtggtttatgatcagacaagagagacgaaactgaaggaaaatcccgaatatagagctgacagatattcagatccggaaaaacatgcccaatatgtccatttggaaaaagggttgaaaatggttgctccatacttctatcaggtggtgtttgccaacagcggttacgatcaggccttgaaagttcatgatgtaaagatgatgcgggcatctgtgctgccggaatgtacagccagtatgattgtggagaccaagcgtttttacgaccgtgctgcccacatggaagggaaaaaaacggatggagtccttccatttgtggcggtaagcgagatggaaaacctgctggacgtcaggaagaatccggaaagaaatgctgcgggactgagcgctcagctgcggaccctgtacatttccgaattccaaaccgataaaaaagagtgggagaagggcgggattacacagctttcacaaattttctttatagatggcaagactgcggaagaatactgcggaaaccgtttttctaatctgccggaacaggaaagagagaaaaggatcgaagcagaaattatgacggcaatcgcgtcaggagaacatcacgttgatattgccaccatgtctcctacgaaggagggaactttagatatacagatgtattctatcaaggcggatctccacgcacttgacaaaaaacagagagagaaagagggaatgtttgcgagcctgatctccaagaaagcggacaaaacctggaataacgataaagacagggcgtccaggcttgaaaaagaacagcaaaatctgtcagagagaatggtctctacgattcagagaaagattcaggaaaaggatgaactggccaggcagtccgcaggggcagaagtaaagcaggcgccccaggcaccagcagcaggggaagaagtgaaacaggcgccccaggcaccagcagcaggggcagaagtgaaacaggtgcctcagcaatcatctggcgggaaaacggcggtaaaaattgcaagcacgctggaagagatgtgcagcatccagaagaacgcggatcaggctcaggcgctccagaaggcagagaaagcaccggcggcgccagaagctgcagccaaggcaagcatacccggacgaacagagctgaaactggatcttacagcaccagtcgcgaaaactggcgaagtcaccgccagtccagagaaaagcaataaaaaaaccatctaaaggaggcggtagctctgcggcaatgccttgtcgcagattggcgtgcagcagacatcacggtgggatgcgctgacatcgcttgcaaagctgaccagggattactccgctcacgaatatggcactatgatggcggtaatcgaaaagcgcaaagcgatcaattcctccagcagccccgaggaggtaacgcttcttcggtgggcggcggaggcggttattccggcggaggccatggggcggaagccgatagaattggctgttggctgcggttacggctttaagcctgaaccgcagcccaataatagagaagaaaaagggagatatagtattatgaagagacaagaatttaactgcaaaaaactgatggtactgggtgctgcactctgccttggactgacggcctgcggcgcgaagacggcagcggaatcacagggctcaggagtgtcacaggaggcaacggaaccgcagacagtacaggagtcgcagacagtgcaggaaacagagactgcagaggaaccgcaggaggcggccgggatgcagattacgatggagcaggtgatcgaagccaacagtacggagaaactgctcggccattatcacagtgcttatgaggtttctccaactatgaggcggtatgtggaaactgagttccgctattataatgaagacggagttaaggaagagattcagatgccggatacggtttacggcttatatgacggccagtactggggacagcttacgccgggcggcgtatggaattctgacagtgaatattatgcttattttgggcttgaccatgaggccaccgcattggaggagatagaaaaaatcgaggataacggcgatacgcttatgctttacacggtgctgcagccagacagtctttctgcgaagaaggatacgcttgggattgattaccgggacggggactggattgaatgttcctataagttggattcggagacgctggcgattctggaaacagaaaatgtgcagtgtcatgcggatgggacaaaggaagagccttccacggtaaccgttacatacgatgccccgcggccggaaggcgctctggcactgctggaacggctgtcggataagcagaacctgcggactattacaatgattttgaatcctggcacagaaaaagagagcagcgatagtgtttacgtacagaagggagaaggtgtaatgcttataaacccggaagggaagacgcttgaagtctttaaagattctgcatgtacagaaccgtataccggaggggctgacactaataaagatcttactatttatggccggtttgagtaagaggataatctccgggccactgaattttttatgaacaaaaaaatgtgaaaacgaataaaaaacttgacatactttttaaataatggtatcctgacaaggtatgtgccgctcaacgaggtcttaagcgtccggctggccggaccaccgaaattggcgagtaaagaaaacaggaggtgccatatgtacgcaattatcgcaacaggtggcaagcagtacaaagtatcagaaggtgacacaatcaaagttgaaaagcttggtgtcgaagcaggagaaacagtaacatttgatcaggttctggttgtgaacaacggcgaactggcagttggctgcccgaccgtagcaggcgctaccgtaacaggtaccgttgtaaaggaaggcaaagcaaagaaagtcatcgtttacaagtataagagaaaatccggctatcacaagaagaatggtcacagacaggcttatacacagatcaagatcgataagatcaacgcttaataagggggactgacagatgttaaatatgaatcttcaattttttgcacataaaaaaggtgttggatccacaaagaacggcagagactctgagtccaagagattaggggccaagagagcagacggccagttcgttttagccggcaacattctttacagacagcgcggaactcatattcacccgggtattaatgtaggccgcggcggagatgataccctgttcgctacagtggacggcgttgtcagatttgaaagaaaaggcagagacaaaaaacaggtttctgtttatccgagaacaatcagcgaataattaactggaatccccgtgcctgtcatggggattctttaaaaggaaaaacattttgcaatattctcaaagttgttatatactggtttatggagtattacagaaataacagataaaaggatggttgagcgatgactattttagaaaattggagaaccctggcatatggcgatgggctggatgataaagcaagggaagagttatggtctaattacttcgtagtggagaaaggaatctatgagcagattctctccgcgccggaggctgtagtggaaggaacggttaaggagctggctgagaagtacggcaccgatattcagaccatgacaggctttttggacggtatcaatgagagcttaaagggatatgagaatccgattgacaccatggatgagaatacctccgtgaagatcgagatcgatccggaaaagttatattacaacatggtagaagcgaaagcggagtggctttacggtcttccccagtgggattcgattcttacggaagagaagaagaaagagctgtataagaaacagaaagcttctggaaccattgtaaaaggtccgaagatcggaagaaatgatccatgtccgtgcggcagcggcaagaagtataaaaagtgctgcggaaagaacgcatagtaacgcaaactgataccctgcatgttatgtgcggggtatttgattgtgggtcggatagacccagttgagtgcgcgaagcgcgcgaaatagaaaccacccgctatgcgggtgcgcggtgttggttataccaaaaatcactcagcctgatataatagaggtgtccaagccactattaaaaaggagagtgattttatggcgaagaaagccaatgaattagcgcatacaaagtggatgtgcaagtatcatatcgtcttcacccctaagtatagacgaaaagtgatctataatcaatataaagaagacctgagagatatcataaaacaattatgtaattataagggtgttcagatactggaggggaaattaatgccggatcatgtgcatatcctggtgagtatcccacccaagataagcgtatccagttttatgggctatttgaaaggaaagtcagcattaatgatgtttgaccgtcatgccaacttaaagtacaagttcgggaatcgtcatttctggtcagaaggatactacgtaagcacagtgggattaaacgaagacaccataaagaagtatatacaagatcaggagaaggcagatatcatgctggacaaattgagtgtgaaagaatatgaagacccctttaggggttagtcggtattcagatagccccttgaaggggcggcaacagaggtaaaagcacaaagtggcttgaacgaagtgaaagccagcgccttgagacgctggcctagtaacaaaggcttatagccgaagcgcgagccacccgttagacgggtggcagcgactgtcagaaggaggagaggacgatggaggcctataccggttttgcagaggtgtatgatacctttatggataatattccgtacggagaatggtgccggtatctgaccggacttttaaagaaatacggcgtcggggacggtctgattctggacctgggctgcggaacgggaagtgtgacggagcttttgtcagaggcaggatacgacatgatcggtgtcgataattccgaggatatgcttcagatcgctatggacaagcgcgccgcttccggtcacgatatcctgtatctgcttcaggatatgcgtgattttgagctgtacggaacggtagcagccgttgtcagcatctgcgactgtatgaattacattctggaatacgatgatctggtggaggtattttcccttgtcaacaactatttagatccggagggtatttttatttttgatttaaacacaatctataaatatgaaaccctgttgggagaatccaccattgcagaagaccgggaagagagcagcttcatctgggagaactattacgaccgggacaccatgatcaatgagtatgatctggccctctttatccggacggaagaagacctttaccggaaatatgtggaaactcattatcagaaagcttattctctgaacacggtaaaaaaggcgcttaaagaagcaggaatggagtttgtggcggcatatgatgcatttactgaagagcccgtcaaggaggacagtgagcgtatctacatcattgccagggaatgcggaaagaaagaggaatgacgatgacagattatattgtaagagccacagccggagaccatcagatccgggcatttgcggcgacaacacgagaactggtggaacatgccagaagcgcgcataacacgagcccggtggctacagcggccctgggacgccttttgacggcaggagccatgatgggtgtgatgatgaaaggggagcaggatttactgaccttaaaggtgcaggggagcggtcctatcgaaggcctgacggtaactgcggactcaaaggggaacgtaaaggggtatgcttataatccgggagtcatgctgccgccgaatgacaaaggcaagctggatgtaggcggcgccgtgggagagggcgttttgagcgtgataaaagatatcggcttaaaggaaccttacgtgggtcagacaattctggtcggtggggagatcgcggaagatttgacctattattacgccacgtcggagcagaccccttcttccgttgcactgggagttctgatgaataaggacaatacggtgaaacaggcggggggctttatcattcagcttctgccgggcgcatcggacgagatgatcgaccagctggaaaagaagctgggagagattacttccattacatcacttttggatgagggaaagactcccgagatgattctgaactatattttaggagaattcggcctcgaaattatggataaggtaccggcggaattcacctgtaactgtacaaaggatcgtgtggaaaaggcgttaatcagcattgggaagaaagaactaaatgaaatgattgacgagggtaagagcatagaggtaaactgtcatttctgcaataagcattacaatttctcagtggaggaattgactgatatccgtgaccgcgcggtgagataggaactgaaccggcagaatacaggctgcgtgttcccgtgatatcaaaaagagccatccgaaatcgggtggctctgtctgtaatcatgtaaaacaatcgtacttcttccttatatgttgtttgttgctgtccacgcctgataaattcatagggggctaccacatcgtgaaaaaggtacatcgataagtcaatgattataatttggtaacgtttactgcctgaggtcccttggctccgtcgactacgtcgaattcaacgctggcgccttcgtctaaagacttgaagccatccatgttcagacctgagtagtgtacgaatacgtcgttgccctgctcgtcggaaataaatccgtaacctttttggttgttaaaccacttaactgtacctttcattatgatacctccaaaatgaataaaaaattatagtatattgagctgcagcacctctgcaacttccctaagaatagcatagtttcggaaatgtgtcaagaatgaaaattatagtggaatccgggtgggaaagtgtggtaaaatgggaacgatttgaagcgtattctgcgcttataagaacagatggaggcggctatgaagttacataatctttggggacattttcatacgataacggcgcacaaattcagagtcatgaagaactgtttccgggtaggactctataaacagggcctccttcatgatttatccaaatacagtccggaagagtttattccgggggtgatttactatcaggggacaaggagccccaacgctgccgaaagggaagagaagggcttttcgaaggcatggctgcatcacaaggggcggaacaaacatcattacgaatactggatcgactttacgacagatatgtcggaggggttaagaggccataagatgccgctgaagtacgtgatcgagatgatgatggaccggatcgctgcatcgaaaacgtacaaggggaaggactatacggatgcatctccctgggagtactacatccatgcgaagaagtacatggtcatagcgccggagacggcaaaactgctggaagagctccttctgatgctgaaggaaaacggagaagagaggacctttgcacatatgaaggccctgctgaaaaaaggtgattattaatgggggaaattttatgaagtgcaacatcagccgcacgaagcggtcttacgagtttcatatggcagaaagccactggcacacacattatgagttttactatctctattcgggtcactgcaagatttttatcaaccatacgctgtattacgtggagccgggagatattatctttttaaaacctggggagatacaccggaccacataccattcgagtccggtaaatgaacgggtgactatcagttttgacggggagtatctggacagtatgaaggaactgtgcggggaagaaaatgtggaatatattttccgaaactcgaaggttaccgtgccgaacgggaaccggagcagggtggaagaactgatcagacggattgagtacgaggagacgggacaggatggattttcccctctaatgaagaaagggtgcttttatgagcttctcgtctctctgtcgcgatgccaggaggcggaaacggatcacggcaggctggaaatcggagaagagactattgaagcagccgctaaatatatctacgatcattaccagaatccgattacgctggaggaggtggcggaattaagccatatgagtcccgcctatttctcccggaagtttaaggcggtcaccggttttggatataaagagtatttgacgaacatcagaatccgggaggcgtcgaggcttcttcttcattccgcctgttccgtcacagagatcgcggaccggtgcggattcggggacggaaactattttggagacgcgttcagaaaggcgaaaggcgtctccccgcgtgcattcagaaagatgcagggcatatgatacggtaccattattttccgcagaggtaatccagtaaatggcggacgtaacctccggactgctccagctctgcaaactgcctgtcatcataaggaaagtacgtgagccggtccttatattccttttggagaaccggttcaaaaacgggggtaaactgcggcaggtagcagccggaccggcgtgtatagcaggtcttggccgttgccttgatgcgggcctccctgtccacatattcggcgacgctcttatggattgcccggtcctcatagatcaggtagtaataatttttatagtcgggataaaaatacttaagctccccctcatataaatccacggaggcggtgagctgcccgcccttcgcttcaatatcggctacagaagaggtacgggaaaaggaaacaggcaccgtataatcactctgatagaccagctttaaggcgtgatattcccggccgaagagatcacttcgtgtcagaagctcctggctctccagcttgaaatcatgctccagatagtccggataattgagaatcggcaggatccccggcattccccgaagatcgtcggcgttatgtaagaggagcagatccaacagggcctgatcctgcgaagataaataatcctgatacacttcgatcagctggccgccggagtaaatgtcttcccgcccgacaccgagaaactgttcgatggctttctgcttcatgctctctaagcccagcaggttccggtaagggcgtatttttttgtagatatccagacttgtcactccggaaaaatcgtaaggcaggccgtatgcgcggcagcgttttaaaagatatggaatgtcgaagccgtccccgttaaaatgtaggaccatggaaaagcgcttcagaaattcaaagaaagtgacgagcacttctttttccgcggacacggtatctgcaaaccactgaaccagattccagcggccgccttcataatagacgcacccgattaaatataaattggtatattctccggaaaacccggtcgtctctatgtcaaaaaataaaagatcttcccgccttccaagacgatctaaagggtaggtctccgggaaaagcatggtttcgtgtattgttatcattgcagtgtctcctgattgatgctgtgctgacgttttgtatgaggaaaacggtgaatctgttttcatggggctattatatcataaaccggtcattcaggaaagacggtaaccggtgtttctgcgcggaaaacaggtgacggttctgcctttgcatctggccgaagctgtcccggaaacagaatatttgttcgattaactgcttgcatatggatacacggtatgttatgattaaagacaaagctagaagagaaaaaggagacagagaacgtgatttcttatgtaaagggacctctggtcgatatctttgaggacactgtggtcattgaagcaggatacatcggactggaaattcatgtgccgctgtccgtactggaccgtctgcctggaattggcatggagacggtcctgtatacgtattttcaggtaagggaagacgggatgtgcctttatggtttcttaaaccggcaggatttgcagatgttcagacagctgatcagcgtcagtgggataggtcccaagggagctttgggcgtcctgtcggccatgacgccggacgaattaaggctggccattataaccggagatgcgaaggcgatttccagagccccggggatcggagtgaagacggcccagcgggtgatcctggatttgaaggacaagattgatatggcggatgttctgcctgcacagtttgcggcggaggaagaacccggaatatcagccggaggcgtggccaaagaggcggtggaagcgctggttgcgctggggtactccacggctgaggcgaaccgcgcggtaggcaaggtggaagtgaccggggacatgacctcggaggatgtcttaaaggcgtcgctgaagcatctggcattcctataaaaacagcaggtagatgagaagatggaacgaagaatcataacaacggaagtaacggaagaagataagcggacagagccaaacctccgcccgcagagcctgaatgaatatattggccaggaaaagctgaaggcaaatttaaaggtctatatcgatgcggcaaaggccaggggagagtcccttgaccatgtgctgttttacggccctcccggccttggaaagactaccttatccgggatcattgccaatgagatgggcgtgaacatgaaggtgaccagcggccctgcgattgagaagccgggggagatggccgccattctgaataaccttcaggaaggcgatgtcctgtttgtagatgagatccaccggctgaaccgccaggtggaggaggttctctatccggccatggaagactatgcaatcgatattatgctgggaaaagattcagcggcacgctcgatccggctggatttacccagatttaccctggtaggcgcgaccaccagggcgggacttttaactgccccgctgagagaccggttcggcgttgtacagaagatggagttctatacgccgaaggaactggagatcatcgtctgccattcggcgaaggttttagaagtagagatcgagccggagggggctgcagagattgccaagcgctccagaggaacgccgagactggcgaaccgcctgttaaagcgggtccgtgattttgcccaggtgaagtatcatggagtgattacaaaagaggtggccgatttcgcactggatattctggatgtggataagttcgggctggataacaacgacagagccattttaaccacaatgattgagaagttctcgggaggtccggtaggtcttgagacgctggcggcctctctcggtgaggatgccgggacgctggaagatgtgtacgagccctatctgctgatgaacggatttatcaaccgaacgccccgcggccgcgtggctacggaacgggcataccaccatctgggactcactctggaatagagcgaaaccagtgaaaaaatataaaaactcagggcaggaacactttgacatccgtgtaaaatatggtatattatgataagagcgcgttacagcaaaagataacaggagagcatgacatggataccaagcactataccgaggttttaatagatggaagaatatatactctgggaggcaccgaggatgagggctacatgcagcgtgtggccagctatatcaatgagatgatcacgacattgaagaggcaggaagggtttacgaagcagagtgcagagtaccagaccgccatgatagaactgaatatggcggacgattactttaaagcaagggaacagattgcgcgtctggaacagctgaagcatgagatggaaaaggaagtctacagtttaaagcatgaactggtgacgacccagatgaagctggaggcggcgaataaggagctggcggcaggaagaactgccaggccgtcgggggcttcagggaatgcttctgagagtaagaaaggcgcagaccggacaggcagtgagaataaggaataatatcggggggatgtctcatgagtaagggagacatcccctgttgcatcagaaggacgcttaaaaaaggaaaactatcattccgatgacagggaggattacgtgaaacagaaaagagtagaaattctcgctccggcgggctcatttgaaagtatgaaggcggcagtggcggcaggagcggatgcggtctatatcggcggcagcaggtttggagcacgcgcttacgcggaaaatccggaggaagaccgtctgttagaggccatcgattacgcccatcttcatggctgcagactgtatatgacggtaaatacgctgatgaaggaatcggagatggcagagctgtgtgcatttctggagccttattatatgcggggcgtagatgcggttatcgttcaggatatgggagcgtttgcactgatcagggagcggtttccggatcttccggtccatgccagcacacagatgaccataacaggctcgtatggcgcgcgtatattgaaggaattgggagcagagcgggtggtgaccgccagggaattatctctggaggagatcgaaagaattcaccgggaggtggatgtggagatcgaaagctttgtccatggagcgctgtgttactgttactcgggccagtgtctgttcagcagtctgatcggcggccgaagcggcaaccggggaagatgtgctcagacctgccgcctgccttatgacgtgaagcgggatggcaggacgctgaacgggaaggacagccggtatgtgctcagtttaaaagatttgtgcacgctggatctcattcccgatatgatagaagcgggaatctattccatgaagatcgaaggccgcatgaagagcccgcgctacacagccggagtggtggaaatctaccggcgctataccgacctctatctggaacgcggcagggctggataccgggtagaggagaaggacaggaaacgtctgctggaactgtttgaccgaggaggccagaccgacggatattaccgccgccataatggaaaagacatggtggtatggaaggaaaaaccgtctttccgggaaggcaatcaggagctgtttgactatctggataaaaattacgtggaaaaacagctgcaggaaccagtcatgggcagtgtcgtactcgagaccggaaagcctgcggtactggaactgtcctgtggagaatgcagtgtgtctctggccggtgataccgttctggaggcgctgaaacagcccatggatgaaacgaggatcagaaagcagctgcaaaagaccgggaatactccgttttattttgaagaacttactgtaacgcttacaggagaagtctttcttccggtgcagtctttgaacgaactgagaagaagggggctggaagcgctggaggaggcggtgcttaagcagtaccgcagagaagtattgcagaaccagcgggaggttttgcagtgcagacgggaagatccgcaggggcagcgggaaattccgcaggattgccgggaaactccacattcagcggtttcggggaaacgggagagcagcagcggccagccccggattttcgtctctcttgagagaccggattgtctccctgctgttctccataatccatacgtggagcgcatctatgtggatgcggctgaattcgggccggaactgtggaaggaaacagcctcgtcctgtcatgacgcgggcaaagaatgtctgctgacgatgccgcacatctttcgcactgaggcggaacggtattttgagcgcagcaggaaggctttttgcgaggccggattcgacggagtgctgatccgttccatggaggaaatcggatatttgaagactcatggcccggaacttccttgggttttcgattatgggatgtatggaatgaacgacagggcggaatcctttcttatgaagatgggggcggcagagctgacctggccggtagaattaaatgagagagagctctcgaggctttccgtaccgggtgaactgattgtatacggccgcctgcccatgatggtaacggcgcagtgcatacaccaggggacggagtcatgcgataaaaagccgggccttcttacgttaaaagaccgcatgggcaaggaatttccggtaaaaaatcactgtgccttctgttataacacgatttataatgcagcgccggtgtcgctcctgggactggaaaaacaaatcagggcgctggccccgacggcgataaggcttcagtttaccgtcgagacacgaaaggagacggctgaggtgatccggtgctttgcagacagtctgttgctgggaaagcagacggagcagcccgttggagagtttacaagaggacattttaaacgcggtgtggagtaggagcctatggtgaatctgattgtcgatgtttccaggtatttgatgatactgctgatcgcggtgtatacctggttgaatttccggtatttttctttccgggatgaaggaaaacaaaagaagatatgcggacgccagaaccggtgcatgtttctgattcattttctggcgtacgggattctgtggctgaaaacggaggacgagcgtctcatcgcgttttacgcggcgcaggtgatcttttttctgtgctacatctacgtttcccgcctgttctaccgccatgtgtcgcggcttctggtggggaatatgtgtatgctgctcagcgtgggatttatcattctgacacggctgtcctttgaccgtgcgttaaaacagtttattatcgtgctggcagcggcggttataacctggattattccgtttattatagaccgggtatggcagctttcgaagattccatgggtgtacggtgttctggggctgattctgcttggggttgtgcttataaccggtatcaacagcttcggggctcagctctccattggaatcggcggttttacattccagccgtctgaattcgtaaagatcagttttgtcttttttgtggcgaccatgttttaccgttccacaaaatttgtgacggtatgtatcacgacactggtggcggctcttcatgtcctgatcctggtggcttccagagatttggggagcgcgctgattttctttgtgacctatgtcctgatgctgtttgtagctactggaaaatgggcgtatcttttgggcggggcaggcgcaggggccgcggcttccgtgctggcgtatcagttgttcgatcatgtcagggcgagggtgcttgcctggagaaatccgtggtcggatatcgaaaacaagggataccagattacgcagtcgctgttcgccattggaacgggcggctggtttggcatgggactctgccaggggatgccggggaaaataccggtagtggaaaaggatttcgtgttttctgccgtatcggaggaattgggaggaatctttgccctctgtgtgctgctgatctgtttcggctgttttctgcagtttatgatgattgcaagccgtatgaaagcagtcttttacaaactgattgcctttggcctgggaacggtttatatcgtccaggtgtttctgaccgtgggaggcgtgacgaaatttatcccctccaccggagtgacccttcccctgatgagctacggcggaagctctgtgttcagcacatttattctgttcggagtcatgcaggggctgtatattttaaaacggaatgaagaggaagaagaaaaatatgaaaaaggctgacccgaatcccaaggcaaaccgccatattctgatgatcacctatggaatggcggcgctttttgcaggactggtcctgtattttgccttttttcttcagataaaaagtgaaagtgtaatcaataattcctataacgccaggctggacagcttttcagaccgggtggtcaggggcagtatcttaagcagcgacggccgggttctggcccgcacaaatgtggacgagaacggcggcgaaacgaggtactatccttacgattccatgttttcccacgtagtcggatactcaaccaggggaaagacaggcctggaggcactgggaaacttttatctgctaaccagccatgtgaatctggcggagcaggtgatcaatgagctgtcgtctgtaaagaacctgggggataatgtcgttacgactctcgatgtggatctccagaaggcggcatatgacgctctcggcggccggaagggggcggtggtcgccatggagccggatacgggaaagatcctggcaatggtttccaaaccggactacaatcccaatacgctgtcgacagactgggatgctctcgtggcaggtgacaacggggaggggcagctgttaaaccgcgctgctcagggactctatccgcccggttcgacatttaagatcgtgacggcactggagtatataagggaaaatccggagaatttcagagattaccggtttgactgcagcggattttttcactatgaggattacacgataaagtgctatcatgagacggcccacggcagtcaggattttacccgggcctttgcaaattcctgtaatggggcctttgcaaaccttgccctgacactggatcttggaaggcttaggaatacggcggaacagcttctgtttaatacgccgcttcccgtcgcggttccatatagccagagcgcctatgcgctgactccgggcggagatacgtggcagattcttcagacctccatcgggcagggacagacccagatgacacccgtacacggtgggatgattgcggcggccatcgcaaacggaggcacactgatgaagccgtatctcattgatcatgtggaaaatgtgggcggtgatgtcattaaaaaattcatgccccagtcctacggcaatctgatgaccgcagaggagtcgaccgtcttaacggaactgatgagagccgttgtgacggaagggacaggttctgctgtgcgtacagacgcctatacagtggcgggaaaaacgggatcagcggaattcgataaggataaggagactcacgcctggtttatcggatttgccccggcggagcaaccgaagctggtggtaagtgtgatcgtggaggaaggcggttccggaggaaaaacggctgcgcccatagccaggactttgtttgatacctattttgcgagataaaagaacactcttgcatataaggttaaaaagaggtatactatacccagtctgtgagacacaccaaaaccggaatcccggatcgggatgcaaggtttcagtctggaggaattgcaatgatagaggcaacgagctgtggcggtgtggttatttttcgaggtaaaattctggttttatataagaattacaaaaacaaatatgaaggttgggttttgccaaaaggaactgtagaagcgggagaagaatataaggagacggcccttcgggaagtgaaggaagagacgggagtcagtgcgtcaattatcaagtatatcggaaagagccagtactcctttaatacgccgcaggatatggtggagaaggatgtccactggtatctgatgatggcggacagctattacagcaaaccacaacgggaagagtattttattgattccgggtattataagttccacgaagcgtatcatttactgaagttttccaatgagaagcagattctggaaaaagcatataatgaatatctggatttaaagaagagcaacttatgggggaataagaagtatttttgatgcgtgaatgtgtggaagaatacggagtataggaaaagagatgcagggatgccggcgatgacgggttcctgcatttttcatttttacattttcatatgaaaatgaagcaaggttacagaaggaacgtagtaatttctgagatttcgtatatactgtttggtaggatcgtcttttactgttttcagtgtatttttgctgccgttttttcccggaatttccatactttacaggatatggcagaagaggtatactggatacagatatgacagattatgaatatagagacaaggagataagacatcatgagtaaagcatatgaaagattggaaaaagtactggaaaagacgatggcgctgcaaactgcgctgattctgtttgaatgggacaacgagacgctggcgccagaggaggcaggagccaatacagccagagtgatcggggctttatcagaagagtattaccgtgttatggccagcgaagagatgaaggaggccattgagacctgtgagaaggaagaggggctcacggatgtggaaaaagctattgtaaaagaggcaaaggagacgagagagcagctcgtctgcatcccttcggaagagtaccgtgataatgcgcagctggtgtcggaggccacgagggtgtgggccaaggcaaagaaggataatgattttgataaatttgtccctactcttgaaaaagtagtggactatcagaaaaaatttgcctcctacagggcgaaggatggcgagaagctgtacgattccatgttggatttatatgaaaaggactttaacatggagctgctggatcagttttttagcgaattaaaagaggcaattgttcccctgatccgtgagatccgggagcgtggaaagaagatcgacagtgaattcctaaaaggtgattatccggaagaaaagcagagagagctggcggaatttttggcagaatacgtaggctttgactttaaaaagggtgtcctggcagtcagcgcccatccgtttaccacgaatctgcacaatcatgacgtaagaattaccactcactacagtgaccgggtggacagctccctgttctcggttatccatgaggcaggccatgggatctatgaactgggcattggcgatgaactgacgcagactctggctggccagggcgcatcgatggggatgcatgaatcccagtccagattctttgaaaatatcatcggccgcaacgccgctttctgggtaccgctctatgagaagctccagtctattttcccggagcagttagagggtgtcagcagagaccagtttgtggaggccatcaataaagcagaaccaggtctgatccgcacagaggcagatgaactcacatacagccttcacgttctgatccgttatgagatcgagaagatgatcatcgaggaggatctggatttaaagaagcttccagagatatgggcggacaaatacgaagaatatctgggaatccgtcctgaaaatgcttccgaaggagtgctgcaggatattcactggtcgcagggatcctttggctacttcccttcctatgcgctgggcagtgcatttggagcacagctgtattattatatgaagaaggagatggatttcgagggccttctggagagaggggagatcggagtaatccgtgagtatttacgggatcatgtccatcgttttggtaaattaaagaccagcagagagattctgaaagatacgacgggagaagattttaatccgaagtattatattcagtatctgaaggaaaaatacagtcgtttatatgacttatagaaatatgttccgtaaacacaaaaaacagttgacaaatggcagcattaagactaaaatcagtaaaaagaattcatatgaaaacactatgaattagaaaagaggctgattatggaaaatatcagaaagagtgcaatggaactgattggcaacacccctctggtggaactgactaattatgagaagaagcatcagctgaaggcttccgtcatcgcgaagctggagtatttaaatccggcaggaagtgtgaaggaccgggctgctctgtttatgattcttgatgcggaagaagcgggaaccttaaagccgggcgccaccattatcgaaccgacatccggcaataccggtattgggattgccagcattgctgcgatgaaaggataccgggcaatcctgaccatgccggaaaccatgagcatcgagcgccggaatctgttgaaagcatacggcgcggagattgtactgacggatgggaagaaggggatgaagggagcgattgcgaaagcagaagagctgcgagacgagatccccggttccgttatcatgggacagtttgataatccggctaacgtgaaggcccataaggagacgacggggcctgagatctggagagatactgatggaactgtggatatttttgtagcgggcgtaggttcaggcggcacgattacgggagtgggagaatacttaaagagccagaatcccaatgtgaaaatcgttgcagtagaaccgtcaggatccccaatcctttcgggcggaaatccgggacctcatggccttcaggggattggcgccggcttcgttccgacaattttaaacagggatatctatgacgagattattctggtcaaagaggaggacgcctattcaactggacaggagatcgcccggaatgagggaatcctggttggcatatcatcgtcagcggcagtatgggctgcgaaggagttggctgagagacctgaaaatgaaggaaagaaaatagttgtactgcttcctgatacgggagacaggtatttgtcaacgccgctgttttcctgataaaagagaaaaaagtgatggaatgggccgtgggaatatgattgattcccacggctttttgtataattgaatatgatcattatatcttacacctcatcggtttggttgtgcgcggctgatggggctttttttcggatggctgtgtaccttttgtaaaacttaatttcgggaacaataaatgttacaatgcataaataaaacggcaaaattacaagatacaatcataaaactgtgtgattccggtgatgtatgagtgaaaaaataaacgaacaggagagagacagagaaaatgaatgaacttaggattaagaaagcggaattagagggatttaaaaactatttaattatggaagaaagaagtaaaggaacgataaaaaagtatatccatgatattgattgctttttgaattatatcggaaagaatccggtaactaaggcgcagattatcagctataaggagtctcttcaaaaaaaatacagtgcgagaagtgtgaataccatgctggcctctctgaacagcttcttccgatggctggatcatccagagtttctcgtaaagcagctgaagatccagcagcaggcattttgcctggaggaaaaagaattatcgagacaggagtatatacgtctggtaaaggcggccagaaaatccggtaatatcaggctggaaatgatcctgcagactatatgctgtacaggaattcgggttagtgagctgtgttttgtgaccgtaaaggccgtaagactgggatatgcagaggtatgctgcaaaggaaaaaacagaaggattatgataccgggaaatctgagaaaaaaactgcttatttacattcagaaaaatggaatcgaaaaaggcgaggtatttatcacgaaaaccggaaatgccatggatagaagtaatatctggcgtggaatgaaggggctcgcagcagaagcaggggtgctggccgataaaatatttccgcataaccttcgccatctgtttgccagaagtttttatgaaattgataaggatatcgcaaagcttgcagatgtgctgggacacagcagtattaatactaccagaatttatatgatttccacaggggaggagcacaggagacagctggagaggctgagactggtgatttagaggggggaacaacataataaatattatgttgtttatagggcgaaatgtcgcctgccgcctgcatttgggtcatggttttttataaaaacaatcatatattttaggaaattttggattttaagagttgtaaaaagtcgaaatgcgtgatagtataatatacagttttggtttaaaacatacattaaaattgtatttacaacataatatttattatgttgtctcatcgaaaggcgggatgaaatggttacctataacaggcaggaagtgggaaaacgactgggctgccgtcgacgtgaaatgggactgacaggggaggaaatggggagaagaatcggaaagaatggacggtattatcgtgacattgaaaatggccgatgtggaatgtctgttgagaccttgattcttctgtctgaggaaatgggattgtctctggattatctgatctacggagattcgtctgatgacggcaggttaggggagcagaagcagattgtaaatatattatcccactgtaatggaggcattcgtgagggggcagtaaacctgctgaaggtttacttggaatctgtatcgaagtgatgcagattagcgatagcacggatagatacagaccgatcaagcgatcgatacgaaagacagataacctcaagctttttgggggttatgggagaacggagtataaagtacggtgagagtaaatatgagttatttaaaggaaagtaataaagtatcaaaaccttcaaaaggaaataatttaaaaaaaagacatatcgaacattggaaagtgatcgctttctatcttattatatatgacattatcgcagtgaatttttcctacttttttggtttgtggctgcggtttgatttgcgtttctcaaaaatcccacaggtatatctcgattcatacttgaaatttgtaccgctttatacggtatttgcattaattgtgttctatgcgctgcatctgtacaaaagtctatggagatttgccagctttagtgaattaaatcgaatatttgcgtcgagtgtgattaccacagtatttcatactgtgtttattactgtgttactcaaacgtatgccgatctcctattacgtgatcggctcagccatgcagcttgcgctggtaactgcggtacggtttgcgtatcgctatgtgacgctggagcggaccagaagagaacggaatgtgagcgctgtccacaacgtaatggtaattggcgccggtgctgcgggacaggtgatattaaaagaattgaaaagctcaacggaggttatgtcgaagccgtgctgtgtaatcgatgataatcctaataaatggggacggtttatggaaggagtgcctgtggttggcgggcgcgactcgatcatgaaagcagtggataagtatagaattgaccagattttactggcgattccaaccgcatctccaaaagataagagggacattttaaatatctgtaaagagacccattgcgaactgaagagtctgccggggatctaccagcttgccaacggcgaggtgtcgctgagcagaatgaaggcagtggcggtagaagacctgttgggaagagagccgattaaagtaaatatggaggagatattccaatatatttggggaaaaacgatactcgtcacaggaggaggcggttcgatcggcagtgaactatgccgtcagattgcgggccatgagccgaaacagctgatcatttttgatgtctatgaaaacaatgcctatgatatcgaacaggaattaaaaagaaagtataaggataagctgaatctggtagttttaattggttcagtgcgtgacagtagaagaatcaatatggtatttgagaagtataaaccggatatcgtgtaccatgcagcggcacataagcatgttccgctgatggaaaccagtcccaatgaggcgattaagaataatgtagtgggtacatataagacggcttatgcagcattgaggaatggagcacaaaagtttgtgctgatcagtacggataaggctgttaatccaaccagtattatgggggcgagcaagcggctctgtgagatggtgattcagagtatggatgcggtcagcaaagagggaaggatggatatattgccgtttttgtatgcgcatgcaaataaaacaattgattggcaggtggtgcctgatccggtagatcatatggctgttgagagtgtaagggaagaaaaaaacatggacaccattggacaaggaagcagagcgagaactcaattcgtggcggttcgatttgggaatgtacttggaagcaacggttctgttattccgctgttcaagaagcagatcgaagcaggtggtccggttacggttacacatccggacatagttcgttattttatgacgataccggaagcggtaagtcttgtaatgcaggcaggtacttatgcgaggggcggagaaatctttgttctggatatgggggatccggttaagatcgatactttggctcggaatctgatcaagctgtcagggtatgagccgggaattgatattcagatggcttatacggggttaaggcctggggaaaaattatttgaagagaagctgatggcagaagaggggatgcttaagacggacaatgagctgattcatatagggaaaccggttgaatttgatacagaggagtttttaatgcagctggaggagcttgcaagggcaagttatgagaacagtgaccatattgtagagatggttaaaacaattgttacgacattccagccggtgggggataagcctacgggaaaagagtttttaagaaaaagtggacagggagccggagaggcggcagtaacgacagaagaagagtaaaaggagttgtaaaaatgaacaaagagcaaaaaggtcaggaaatgcagcttattccatttaccaataaagtctggctgagttcaccaactatgcacggtcaggaaatcgagtttgtaaaagaagcatacgaatcaaattggatgtctacgattggttctaatatagatgaggcagagcgccttatttgtgataagacaggctgcaaatatgcggtagctttggcgacaggaactgctgcacttcatatggcgataaaattgacggggataaagccgggcgataaggtcttttgttcggatctgacatttagtgcaactgtcaatccggtgaaatacgaaggtggggaagcagtttttatagatacggaatatgatacatggaatatggatccgaaagcgcttgagaaagcatttgaattatatccggatgtgaagactgtggtggttgcccatttatatggaactcccgggaaaattgatgaaattaagaaaatttgtaaaagacacggtgcaatgcttgtggaggatgcagcagaatcactgggggctgtctataaaggaacacagactggagtgtttggcgattttaatgcagtctcatttaatggcaacaaaattattacaggttcctccggcgggatgtttttgacagatgatggggaagccgcaaagagagtgagaaagtggtctacacaggcaagagaaatcgcatcgtggtaccagcatgaagagttggggtacaattatcgaatgagcaatgtgattgcaggagtagtaagaggacagatcccttatctggaagaacatatttcacagaagaaagcaatctatttgagatataaggaagcctttgaaaaagcaggacttcctgttgagatgaatccatatgacaaagaaaacagtgagccaaatttctggctttcctgtctgctaatcaaaccagaagcgatgagcaggcaggtacggggagaacaggaagcgctgtatattcgggaaagtggaaaaagctgcccgacagaaatattggaagcactgaccaaatacaatgcggaaggacgtccaatatggaagcccatgcatatgcagccgttttatcggatgaacccgtttgttacgaggtatgggaacggaaggggaaaaacagatgcctataccgacggcagaataggggctgccttggggaaggacgagctgctgctggatgtgggggcggatatttttgagagggggttgtgtctgccaagtgataataagatgagtaaagcggatatggataaggtgtgtgaaattgtgaagaggtgttttgggtgatagggcagcatgggctgtagaaaaacatgtatattacaaggctgttctcacatatggtgtttgggcatgagctcaagaaaatgctgagaaatgacagcatacctgcggttgactgtgtgtttaacagctttctcgtaatattatgactcaatattaatgatagccacagtgtggcactattataaaaataatcagttaggaatgatttaagcaatgcaacatataacagagataccagtcttggaaagagaacgctgggatcaagcagtaaagtccattaagggctacgatgttttttattttaatgaatacgtgactgcatttatgcatgaggatgagagtaagggagagccggttcttttgtattacgagaacggctctgatcgtgctattaatgtggtttttaagagagatgtggcgatggatcaaaagttggcggaatctcttccaaacaacacatactttgacctaatcacgccctatggatatggcggtttcataggttctattacggattacgatgcactcaacgcctcttatacagcctactgcgtagataagtcctacgtctgcgagttcgtccgttttgaattgttctcgaattaccatatgcactacagcggtgagacagagactcggacacacaatgtagtaagaagcttagatattcctattgacaccatctggatggatttcaaacagaaggtcaggaaaaacgtcaagagggctaacacatacggcttggagatcatagtagatgaggatggcactcacatggatgatttcctgcgtatctattacagtaccatggagcgcagtgatgcagaggatcagttctattttaagaaacccttttttgaagaactgatgtccatggagaattcggtaatgttctatgtaagattccaggacaaaatcatctcaacagagttagtgatctatggctcagagaactgttactcgtatcttggtggtacagaatctgaatacttttatacgagagctaatgattttctgaaatttgaaattattaagtgggcgaaagagaagggattaaggaacttcgtccttggtggaggttacggtgccgatgatgggatatttcagtacaagatgaacttggcaccacatggaataagggatttttacataggcaggaaggtttttgatgagggagcttatcaggaactattacatataagaagcaaaggtaatagtgagatggaaaagaagctgattgatagtggattcttccccgcatataggggtacccattaaggttactcaggggaatccgagatttgaagatgtgaataggttttgacctcatcaaagatactataaggatcatggaaaatgtgtttgagaaggctgcaagataaaaatcatttgtagagggcataaatatgaacaagaaacgattattacagacaataggtctgactctgaaacggggagctgggcaaagaggagaatatttgagggagaaacatatccttgcatctgtgggagagaacgtttattttcagccgagattagttccgctttatccggaactgattaaactgcataataatgtcatggtatcggctggagttcgactcatcacacatgatgcatcttttgtagttctgaataggcttggtaaaggggagttccctgaaaaggttggttgcattgaggtcatggataatgtctatatcggatataacgcaacgattatgcccaatgtaaaaattggtagtaacgtgattgtaggcgcaggtgctcttgtgtcaaaggatttggaacctaatggagtttatgtgggagttccagctaagagaatatgcagttttgatgattacatggtgagacattgtgaaaatcctgacaatcaggggggggggtattcctatccctatgtacagcataatcaaaacatatctaagaaagagattgagaaagcctgggagttctttgagactggtaggagtataaattcgggaggagattaggccgtggacaaaaaaaagaaaattgctataactgcggcagtgagtgctggggtaggtgtagcgtcatatagattgagaaaatcgttaaaacacagtaaggacagtgaatccattactgatttagactctaacaatacagaaagcaaaagtatttcgcaagtgttttcacatacggagtgttattatgaaaagcatataaaacgtactatggatattatttgttcagggcttgccttagttgttctttcacctgtttttcttgtttctgccgtagcagtgtggattagccttggcagaccagtaatatttgttcaggaaaggttgggcaaagatgaagtgccttttaatcttctgaaatttagaagtatgaaaaatgtttttgatgaatatggtgtgcctcttcctgaccagaagaggagaacaagaattgggaacattatcagaaaactaagcatagatgagcttccgagcctgattaatatacttaaaggtgacatgagcattgtgggaccaaggcctttaccaactaactatggaccttggttttacgaaaatgagaggaagcgtcattctgttaaaggtggattaaccgggctcgctcagataaatggaagaaatgtactttcatgggaagaacgcttcgtctatgatctccagtatgtagatcatatcacgttcttgggtgatgtaaagattatactaaagacagtagagaaagtattgaagagaagcaacatcggtgaaagaggcgttaactccccaggagattttcacgtttataggtctgggatgacagagcaagaattggttatgtgggaaaaagagaaaagggagaaggaatgtaatgcgtagaaaaaagttattaatgttgaatgcaagcaacagcgatgtgccgttgatccttgcagctagagaagaagggttttatgtaataaccacaacgactatgtcagattatattgggcataagtattctgatgagtacatctatcatgattatatggattttgatggattagtagagctgtgtaaggaacatatcattactgctgtatcttgcggtgtcagtgacggagcttcttttccagcctcttatttgacagactattttggctggaaaggccatgactcatatgaaactataggaaaactccataataaagatgaatttaaagctttggctaagagactcaaactaagatctcctgtttcggagggattcgataacatagaaggcgcccttgcctatactgaaaagctgacctatccaacaattgtaaagcccgtagatttgggtggaggacaaggaataagtgttgtcaataatccacaggagtatgcgaaagctgtgaaagttgcaatcagtcgttccaaaatcaagaggattgttgtggaaccatatattgttggcactcagcatagctttagttcattccttatagataagaaggtagtgcattactgtacatgggatgacttgaactactccgaccgttttatggtctccaagggatcttatccggcttcatataaaaatgcagagtatatagataagactatatgtgaagaaattgaaaagattgcggcagaattaaatcttgtagatggtctgctccatcttcagtttattgtttccaatggagcgccttatattatcgaagtgatgagaagggcaccagggaactgggatacatgcctttcttctgttgcgtctggagttgagtggaataaatggatcatcagggcagaggcgggcatggattgccatggatttcctatggggcgtatccagagtgggtattggggttactattgtcttcttggaagcagaaacggcgagatgaaggatatcatgctttcagaggatattaaaaagaatattattcgctttgaccgatgggtggacaatggatttaaaattactgattttaaacatcagaaattagcacttttccagttctggttctcttctaaagaggagatgaatcagaaaatgggtataatagatgatctgatacaggtagagtacaaataaaaagcagaagggagagagtgtgtgtgaataaaaagggtgaaatatgtctgggtatgataggtgccggaagagcaacagagttgcatatgaatgcactgactcgttatacaggagttcctctttgctttaaatggattgctgcgcatcgttacgagcaggtgaacatgatgaaagaacgctatggatttgtgaactcttccttggactatcatgatatccttaacgatccagaggtggatattgtagatatctgcacaccgccatatgcgcatacacagatgataattgaagctatgcgagctggaaagcatgtgatttgtgaaaaacctttgacaggttattttggcgaggaaggtgacgagaggcccataggaattaatgtttccaaggtacacatgtatgagaaactgtgtgagtccttggaggaagtaaaaaaagtagtagatgaatctggcaaaaagtttatgtatgcagaaaatttcgtctacgcccctgctgtgcgtaaagcagctgagattcttacaaagaagaaaagtaagattttatatgcaaagggcgaggaaagtctaaaaggatccagttctccagttgcaggagagtgggataaaactggtggaggcacttttattcgtaccggagcacatcctctttctgcaatcctctggcttaagcagattgaatctgaagcaaggagcgaagagatcacagttaaaagtgtctttgctgacatggggcatataacaccatccctttcagattatgatcatagacatatcgctgctagaccacatgatgtagaagacaacggcacggttattattacattttcagatgacagtaaggctgtggtgattgcaacagatgttctccttggtggaagtaaaaactatctggagctttactgcaatgatgccgtaatcaattgcacactaacattgtcaaacttaatgagtacatatttcttggatgaagataacctggatgatgtttacatctcagaaatgcttcctttaaaaacaggatggaataatccttttgtagaagatgagatcattcgtggctatatggacgaactaagagattttgtagaatctgtttattttgatagagagccgaagtctggatttaagttggcctatgattctattaagatcatatatgctgcctataagtccgcagagctaggaaaagcagtggagccgtaatgaagtgagataagaaagaacagtaaatgaaagtaaatgaaggtatgaattaatgatacttgtcaataaactgccagatgtggaagaagtaaaaaatgagtaccctcttacaaaggaacaggaaaataataggggagttttcattaagcagataagggatattctctctggcatagataaaagaaaaatacttatcataggaccgtgttcagcagaccgtgaagataccgtggttgactatatggtgaggctttcaagagtcagagaagatgttaaggataccatattcattattccgcgagtttatactagtaagccacgaaccaatggaattggatataaaggacttcttcataatccagacacaaatgatgcacatgaggatctaataagtggagtattagcctccagaaaaatgcatttgaaagtaatacaggaaactggcatgtatgcagccgatgagatgctatatccagatagccttatgtatttcgatgatttactctcttatcttgctgtaggtgcgagatcagttgaagatcaaatgcaccgggaaatggccagcggctttaatattccggtaggtttaaaaaatcctacaagcggagacctctctgtgcttctgaatgcaatatttgcagcacagcattcacagcggatgctttatcacggctgggaggttgcaacaaagggcaatctatatgcacatgcgattttaaggggatatatagaccgaaacggaaagatgtattcaaattaccattatgaggatttgaacgatttccatgatcagtacataaagttaaatttgaaaaatagttctgttatcgtggactgcagtcattgcaattccggaaagaaatattatgaacaggagagaatcctggaagaagtactgtctgtgtgcagcaggaaaagagggatatcctcgttagtaaaaggttttatggtagaaagctacttagaagagggaaatcagatggtaggaagcggaatatacggcaagtccataactgatggctgtatcggatgggataaaacacaagagctgatttataaaatggctgacacattagcgtagatgaaataatgaatatcggggtgatatagtggcagagataggaagtgaattctgggaggcagcagatacaggcaaaaaaaaatacctgatatcaggtagagctgcccttgaatacattatacgtgatattttagaagaacacagtgttgactctgttttgatgccttcatattgctgctacaccatgttagagccatttgtaaggcatggcataaaaatcaggttctatgacattttctatgatgaagaaaaaggcttatgcgctaaactgccggaagaggattatacagaagtttctaaagagaaccatgataacgagattttttattatatgacattctttggcttttctcagttatccgggttggatgtaaagcaaatccgtgatatatacggactgataatagtggatagaacacattcgtggcttagcgatagtaccttccaggtagaaatagatgctgactatacatatataagtttccgaaaatggacaggtttttatgggatcgcagaagcaataaagcagcatgcaccttttgtccttgagttaggaacagttggaagcgagtattccgaacatagaaaggaagccatgatgatgaagaatgattatatcaagtggcaaagaactatcgaggttgatgaacatctttcacatgctactgagattgcggaagctgaaggacaaaagaagaattacctcaataaatatgacgaagcggaggattttttggatgagcattatgtaggaaataagcctacaacagaatgtgtatatcaattgcttttggctgactggaactttgttaaaggacagagaaggacaaatgcagtggttctgctgcaagggctgagggatatacctgagatcaagcttatgtatggagagcaaagtgagatggacgtaccactatttgtccccattttggtgaaggatgacagagatggcctgagaagacatctgattaacaaacagatttactgcccggtacattggccgttatcaaagtatcatcagaatatctcgaatcaagggaaagaaatatataacagagagatctccttggtgtgtgaccagcggtataccgaggaagatatgaacagaatagtcgatgcgattaaagatttttttgataagaaaagtgtagcttgtgagcaagtcacaaatatcagagattatgtatgtaactgatgttgaatcagtagaaacgagtttgtaagtatgagagagactacagtaaataaaacactaaaaaatagaaaaattaaaattgcatttgtttcattgttttcaaatatcagtggcgcaactttagcaatgcttgagatcattgataagctcatagaagatggaaactttgatgtgattgtcattaccggatcaagggggacattagagaccagacttgaagaaaggaatattccggttttcaagtgtttgttcttctcatggctaaaggggaggggaatagttgaggagataaagatacgggttaagcgcgttctttcattcagaagtgaaatccagattttaaatattttaaagcaggagaaagtggatctcctccatataaacacaggaatttctccggttggaattaaaagcgcaaagaagcttggtattcctgttatatggcatttgagagaggaacctgtttcatattttaacagggagccgtatgataaaaaagttgaattacgcagtataaaacagactgacgcaattattacaatatccaaatatatttacgattgttacaaagataaattcaaccataatgccagagttatatatgatggagtatatacagaaggagccgacgatttaagaacaaaagagatttttactggagagaccgttcatatgtcgttatgtggttacaacgctttcaagggtcatgtggaagccataaaagcgctgtcactactccttaagaaaggttatgagaatatttacctttacttttatgggaatatagaacccacattcaaaaaaaatcttatggcaatggtggagaaaagagggctcggtaaccatgttaaatttgaaggttatgtagatgatatgccaaagaagtgggctgagtctgatattggactgatgtgttcagatggggaaggctttggaagggctacagtagaagctatggctaccggggcgcttgttataggtgcaaataaaggtgctactcctgagataatagaagacggaagaggttttctgtatgagaagggaaatgcaaagcaactggcaaggaaaatagtgtacgcaatagaacatccggaagaggcaagaaggacagcaaaaaatggacaaagatacataacttctggaacattctctatggataggaatattgataatttgaaaagcctataccaggaaattcttgaaaagaaaaagataacttcggtgaagatataagagcaaaaatgaggtaaaagcatgaatgcaaccacagcaacgacgctgacaaagcaaaatacagcagtaaggttaattaaacacaacgggcttgatagaatatttgcatttttatttgcagttatggtgatagtgcagcctcttcgttcattcttaccagtgacccttagtatggcgattattattgcttcgattccatacatacttttctttttgagcagtagatggttaagtatgaagagcgtgtattttgttgccctatatgccatattccgtataatcaatcatggaacatcggttgaagaatttattactatgctttttttgatcttgctggtaatttttctaagtaataactggttcgatttcgatgatttttttaaatggactgtgaggattagttgctttgcatcggcatgtcttatcttacagaacctggcgcatttgatagctaatattcacattccatttttaaacattggaatgttgcgagatggcatgtccagctatgagacacttatatcaaccggaacggcctccggagtttatcgaccatcagctttttttattgaaccgtctgcttacacacaatatgcttatcctgttctggtgtatctgctttttaagagtggcagcaaaagaagtcttaaatttgcattattgataagcataggaattatcgccagtacatcaggcatgggtattatgctttctgtgggcttatggggattatatctgttctacaatagttttggaacaggaaaaattaaaagaaagtggtttggagtatttatcgttgctgtattaatggttcttgttgcttatattatgtcgccacagctacagtatagtgtacagagaatatttactggaataggagggcaaaactctgccatccaaggccgcttaggtggagggcaatattatatttctctttttaataggtcagagtttttgttcggcacaggtgatgctggaaccgaattaacaatgtatatgtctggattgtaccacttgatttatattgacggagtcatatgcgcagccttgtttattttgatgtttgctgtgcaggctatcagaagaagagggggtgacaggctgttgccttgtattgtaattttgatgaccgtattttcagacactacgctgattcaaaccttagtatatgtcatgatatatgtttttgctactgtaaatcatgtggaagttaaacagctcaagaggaaaataaaaataagggtaccttcaaaacactaatcctcagaagatacttaacaaattggagtgatgaagatgaaaaaaatcggtttagttacattatggaaaagaaattacgggtcagcacttcaatgctatgcaacgaaaagtatggtagaaaagatggggtatcactgtatccctttatatagaacatttcctggtattcagaggtatacctattacctgggagagatagtccgatttgccatagatagttttcggtataaagggtatatatcaaagtatacatcattaagatctgctggaaaaaaatctataggaagcctttcgaagaaatccgaagagtctatagaccggtttgtagatgacacattgcagcctgaaggttacagctatagccaactaaagaatataggaaaatccgaagacttcattgcttttattgctggaagtgatcagatatggaatggctccagacgatatgacctggtatcctttttaggatttgtatcggacaaaaaaaagatagcacttgcgcccagctttggaagtgaaatagaagactataataaaaggtccttttcaaaagaaattagaaaattccaattattatccgcaagagagcaggagggtgtagacaatatagcagaattaactggccgtgatgctattcgcctgtcagatccgacctctttcttgacaccggacgaatggagagatttcagtaaggcggcagatgatttggagggagagtacatattcattcattttttagacaaaccctgtgatttcgcattgcaggcaatggaaaaacttagaagtgataggggactaccgatggtagcatttgcttatccgcaagaagagtatgaaagaataaagggaataaggttttgcaatggagggccgagggaatatgtgaagtatatagatcgagcaagttatgtaatgactgattcttttcacactacattgttttcgatatattttaatacttcattttttacattccacaggcagtatactcacaatgcgaagcaaaccagtcgtatttcaaacctgctcacattgtatggttgtgaagaacgttttgttgctgatatggctgcatttatagagatattagattctgatttgccagatagttttgaaatcagggataaagagcgacaaaaattaattggatatctaaagaaagctttagatgactgaggataggtgcaagtcaggcaccagtaaaatcaaaactgtaggaggatggtaatgtgagcaatttttccgaagagaaaaatgtgttgatgatgatgagtctgatgaaggctcataatataaaaaaggtgattgttagtccgggaaccacaaatgtatcattggttgtaagcatgcagcaggatgactattttgaactttattctgcttatgacgaacgcagtgcagcttacatggcttgtggtatggcggctgagtgcggtgagccggtagcattatcatgtacccaggcgacggcgtccagaaactatttttcagggctgaccgaggcttactaccgaaagcttcccgttgttgcaattacatccacgcaacaccccgggagaatcggacagggatttcaacaggcgattgacaggtcagtacaacctgtggatacggtaaaactaagtgtccaagtgccaatcattcatacagcacaggatgagtggcattgtaatgtactgataaatagagcactaacggaattacgaaggaacggcggacgaccggtgcatattaaccttttcaccacatacagccgtgttttcaatcagaattcattaccacaggagagggttattcaaagagtcacttattttgatgcttataagaatagattgccagagatacctgatggtgtaaatattgccatatttgtaggcgcacatcggaaatggacagtggaacagttggatgttgtgaatgctttttgtgacaaatataatgctgtcgtctgctgcgatcaagtaagtaactatcatggcaactatagagtaaatgttgttttggcttcttatcaatgggaatataatacaccggcaatgggagcggatatcgtaatccatattggggaaatcaccggaatgcctcttcgtattcatgcgaaagaagtttggagagttgatccaaacggagagatcatggatactttccagacacagagatatatttttgctatggaagaggagtatttcttttctgtgtatgcagacagagcaacgggggcttcagaccatacttacctgaaattatggcaatcagaagcaaagaagatttctgaagcactacctgagttgccgttctctaatgcctggttagctaaaaatacgctaccaaagcttccagaggattgtatcttgcatatgggcatatacaattcgtataggatgtggagcatgtttgaggcaccaggcagtgttgtgggatatgctaacacaggtgggtacggtattgacggagggctgtcttcgcttttggggaactcactggttacagacaagttggtctttggagtgtttggggatcttgccttcttttatgatatgaactcattgggaaacaggcattatggcaagaatgtacgcatcatcctggttaataatggtttaggtactgaatttaaaaaccctgataacagagcttatcaatttggagatgatgcaaatccctacatagctgccgagggacacaatggagcaaaatccaagaaattagtgaaacactatgcagaggatctgggctttaagtatttatctgcagagaataaagaagagtatatggaaaatctgcctacattcctgtcaccggagatggacagctctattatctttgaggtttttgtcgatactaaggaggatacagaggcctattctgtactgagccattctcatactacagtaaagggaaaagtaaaaacggaagtaaagaaagttctgggtggggaaggaataaagacagtaaagaaactgttgggtagaaatagggatttctaaaccatttcaatagcgaggtatagtaaatatgcgagtattggtgttaggtggcactggagcaatggggatgccattaatagagaaattaagcaatcgtggcgaacaagtatttgtaacatcaagatatcaacatggttctgccgaagatatccattacctgcgaggtaatgctcatgatgaaaacttcctctcagagatactcaagcaaaagtatgatactattgtggattttatgatttatagatctgatgaatttgcatcgagagtaaatagtctattggaatctacggatcagtatatttttactagctcaagcagggtttatgctgattcggaaagtcctattacggagtgttcatccagactattggatgtaagcaacgatgatactttccttgcgacagacgaatacgcactggcaaaggcaagacaagagaatctgttatttaacagtggttcctcaaactggacagttattagaccttacataacatacaatgttgaaaggcttcagttgggtactattgaaaagaatgtatggctgtaccgagcgttacatggcaggaacgttcctctgcccaaagatgtggcgtgccatcaaaccacaatgacgtgtgggggggatgttgcacaggctatagctgacctcgttggaaacaaaagagcttatggtgaggtacttaatctgaccggaacgcaacatatggagtggtgggaggtatggaagatttatagtagagtgttgcaggagcatgccggtataacatcaaaactttaccaaccagaggatagcagtggtatctgtaaggttatggaaaatgaatatcaggtccgatacgacaggttatttgacaggacatttgataactccaaattactttctatatgtcctgatttaagctttgtgtctatggaagagggactcacaatgtgccttcgcaagtttatcaaaaagccaagttggaagggaactttcggatgtggggtagaggcgtatttaaataggcagaccggagagaagacgaagctatctgagttggacagcatagcaacaaagctcagatatcttggctataggtggatgccagggattgtgaatattttgaagggaagatagaaattggaaaaagaaaaaatggaagcacgcaatgtttgcgtagctacggtcacttacaacagaaaagagtatttgttaagattattaaatgctttgagtgagcagacgcatcaaattaataccatctatattgtggataatcactctgtggatggtactatggaaatgcttttccaacagggtattatagttgttaatgggatatcacaatctggattttcaggtttgtggaagggaattagaataagctaccactataatgataccaacactggaggagcaggaggatttgaaaaggcttttaaaatagcattttcaaacaatcatgattttctttgggcaatggatgatgatgttctgcctgaaaaagactgtttagaaatacttttgtcaaagttggatgaggggcataaagtgaccattccatcgcgaacagatgaaaattttacggatcgtatttcagtatcatataatctgacgaatccgtttgtttttaaggtgaatggtaggtataaaatagtatattcaacagaattaaaagaagaatgtgttgacacatatgcattccccttagaaggacctcttttttgcatggatattgtaaggcaagttggatatcctgattccagctatttcattatgtacgatgacagcgattatgcaagaaggtgtcttgcttatactaaaatcagatatgtgacttctgcctgcctgcacaagcaaattattccacctgctaatgatgagttttcctggaaaggatactatggatatcggaattgctttttatatgatatgaagtatggaaagaatataggagttcgcaaactcagaccattttttattatgatggccacgtatttaatgaataaatacgtaagacataaggatttagtagcagatacagtaaaagtagcttttaaggatgcagtggctggaaggactggaaagaccgtagagcctggaaaattagaagaatacttggagaaacgtaaatagtcgagtatggcctgcatacagtaagaaggtagtttttataatgaatttaaaaaattttattgtagataaaataaagagaacagacatatatcagaataagaaagaagaggcatattattcaagtcgaagcaatatgctttccatgctgaccccggatgaaaaatcttcaagtaaaaggcatgtttatttcaagaaaagcaaagcagatgagtataacaaaatgtttggactcatcaacattacaatacggttcggcaacagattccagacatggatagatacaggattatacttcagcaacatatatgcgcttgaagacaacacaacccctgattatgagcttattctggataattccatcaatgatttgattaatagatcaggaaattataacaatagcgtttcttatgaagtccagattatgcttcgtggtatcctttcatatattgatcgaatagttgaagaaatccaagaggccatactgacattaaaggatacagcagatattgacagactgaacaatactaaaacgtatttcctgcgaatgaaggatcagaaatgttcttccctggaggaggcattgcaaagaatactattttggtcaagtctcttttggcaatctcagcatacattggttggtatcggacgtcttgataaagtgctggcaagatataaattagatataccagagtctgttcagattattggagacttttatagtgaaatgcataggtattttgcatttaaaagttccggaaaacttctcggtgatacggggcagattattgtattaggtggtattgatcctaatggtgactatttctgcaacgaatacacacatatattcatagaggtaatgagggataagccgattccggatcctaagattttattacgtattagttcaaaaatgccggatgatttattagagcttgcaattcaatgtatagcaaccggtgtagggtgtcccctgttatcaaatgatgatgttatcatccctgccttagaggagtttggatatacacatgccgatgcatgtaattatgtaacttctgcgtgttgggagcccatggcgtatggtaagtctcttgaaaagaataacattaaatctataaattttggaagatgctttgaaaagacatataacaatgatgagttcacagcatgcaagaacttcgaagggttacttacattgtttcttaacgaggtcgatagagaagcagagaccgtaattaatatattgaataatattagatgggagaagaatcctcttagaagtctattcacggaagattgcatagtgaagggaaaagatatatccgaaggaggagctacatacaataattatggggttttaactgttgggctggcaaatgctgttgatagcctattgaatattaaagaactgtgcttcgaggaaaagaaatttacgctggatcaggtaagaagtatttgcagggaaagcaattttgaatcagttgattcctctttaaagaaatggtatggtacagagaatactcaggtcgctcaattagtagagcagatgacagacagagtgtataataatttgtcatcttatagaaaccgtttttatgggaaggtgaagtggggattaagcgcttcaaactatgtggaatccggagctgtagttggtgctacatttgatggaagaaacaaaaatgaacctcttgctgttcacatatcagcaccatcgggtgtggcatatacggagttaatcaattttgcttcttctcttgattattccggccagagatccaatggaaatgtaatagactattttgttacaccggattttattaaaaataatctcaaaaagtttacactgtttattaaggcgtcaattaagaaaggtttctttcagatgcagatgaacgttgtaagcagcaaaacattgattgccgcaagaaaagatcccagcgcatttcctaatttgattgttagagtttggggctttagtgcctactttaatgatttaccggagaattataaagatattctgatcaaacgtgcgatagaaagtgaaatagccgtttgacctgaaataagggggattgttatctgaatatgggattaatgcgatctgagggggataataatggcaaggaaaagcattaaaaagaattatctgtttaacttaagctatcaaatattgcttttaatcacaccattaataacaactccatatgtttctagggcattaggagcagacgggattggaacagtgagttacgctggatcaatggtaacttattttacactatttgcgacactgggtataactatctatggacaaagagaaatatcatatgttcaggactccgttgataagaggtcaaaggtattttggaacacaaagattcttggtttttttacctccggttgtgcgttccttatatatgtaatatttagcctcttcaatgataatactcccttatatctcgtactcgcatttaatatattagcggtatttgttgatgtaacatggtttttccagggattagaagagtttggaaaaatagttatcaggaacacgataattagaattatcagtatcttatacatttttatttttgtaaagactaaagatgatattctggtttatgcatttggactggctgtttttgttttcttaagcaatctgtctctgtgggcatatcttcccaagtatattactaaaataagtaaaaaagatattcatccatttaggttattacctacagttattaccttatttgtgccaactattgcaattcaggtgtatactgtgcttgataagacaatgatcggtgtcataactcaaagttcctttgaaaacggatattatgaacaggcattaaagatatcaaggactattctaacgcttgttaccgcattgggtaccgttatgataccgaggataggctactattttgaacttggagatacagatgagataaggcgattaatgtatcgtggataccgcttcgtttggtttctcggagttccattgtgcttgggattgatcagcgtatcttctaatttagtgccttggttcttcggacctaattatgataaggtcgttattctactgaagatacttgctcttttaatattagcaataggaataaataatgtgacaggcatgcagtatctgataccatcaaagaggcaaaatattttcacatttacagttgtatttggcgcatgtgttaattttgttttaaatagtatttttatttcattgtggcaatcaataggggcagccattgcttcagtggttgcagagatgagcatcgctgtaattcaattgataattgtgagaaaggagctttccccccttagggtaataaaagaaggcgtgcattattatatagcaggacttatcatgtttggtgttgcatatatgttaggaaatgcgttgtcaccgtccattcttcacacaagtattatagttatagctggtgcattgacttactttgctgttctatttattataaaagatcagttttttatatctaatcttaagaatatagctagtaaagttattagtagaggtagacatgaagtatgattatttagtagtgaactctggcctttatggcgcagtagccgataaggtagtttatactggcccgattgatgcctgtttcgattatcgattaggggaatataaatattatgacatggatcaggtgattgccgctgcctttgatatgtgcgataaagagatcagatcatgatggacaagatattagttaccgacatccagagattttcttttcatgatggcccgggaataagaactacagtttttctcaaagggtgttccatccgctgcccatggtgcagtaatccagagaatcttgaaccagccatacagagatatataaaggatggaaatgaaggtctctacggcagatggtatagcagtgcagaattgtatcaggaagtgatcagggataaagagttttatatcggtgatattacagaatataaaattacagatcctatgatgttagacaaacttccaggaggagtgacattctctggaggagagtgtttattgcagatgagtgagctggaggatgtactacggaggctgcattctgaaaaaatacatattacaatagaaaccagtttattttcaaatatcgagcaattagagatagcattgaaatatgttgatctattttatgtagatatcaagattctggataaaatgcgttgtagaaatgtgctcaaaggcaatttagatagttattataataacttgagcgttctaatgaaaagaggcgcactgactgttgctaggattccggtcattgcaggatttacagatgacattgagaatagagaaagagtggctgaactgcttggaagctttcaaggtaatctgcttaaagttgaaattataaaggaacataatctggggattagtaagtatcagtcactgagaaaagcaggaacatccattaaagttccagactacaaaggcgtggaggataatatgcttattgattatcgagcacggttgaagaaatatgtaaatgtgccggtagaagtgtgtaaaatataggtatgaatattagaaaatttaaatccgacagcatcactttcagtaacagagcttcgatctactacggtaatgaaatggagttcctgcataatccaataaaccccaactgcttgactcacacttccagctgggggtataatataagcgaggatttttttaataacgcaatatccgtaaagaaactggaaaaagcaattcggttgggaaacttgggagcgtagtttgttctgatttcttcattaacgtttgaacggcttcaatttgttagtgctgagaatgcagtgtgggataaatactgtgtgttaaaatcaaaagggataaagtggcactttctgagtatttgaacagtgaccgaagacctggttatagtgcagatgaactgtatatgctggatattatgcgtcagggggagaaaccagatgatccacgcttatgatgaaatgtatgttgaaggagccatgattcacatgggtgatatgatagaatatgcctgcccggattgcaggtatgctcctgatggattctggagaatgtttctccagaatgaagtggtacgccgttttgaaattggagatgagtctgtggtagcaggaaagtcgggatcggagttggccatacgtggatttggcggcgatagagaagagcgaaatgatcgatactagagcggctggctgcttgcatattttaagtggtacacagcgcagccgttttctgttatctggagcagtatcagcattcggaggctgcaaaagatgtattctgtatttcacgaagcagttattgctaaagtagcggacatgttattagagatttagaaaccgataaagaagacttgatcagtaatctgcgtcttgtgcgtggaatgatacagcaggagttagctggtcgtgctcacatgagtatttcgcaattgcagcgattggaatatggggagcgaaagtcttggaatttgtcattgaaatcagtgttagcgcttgcaaatgcgctgggtgttaatgtagaggaattggattaaatcagagagagtgcccggatgtctgtcatagatgtccgggcgtttatttttgttgtgatatagtatagttgtaacgtaagtggcttataagatacgtaagcgccaagtattagggaggctggcgctttactaccaaatactccataatagtagatagctagatgcaagcattttactctggaatacaataaatcccattgtcaggtgcgagcacttcactacatatttgtggaggtgttaaaaaatgtccaattacaatgccagagtaccagctgacaagcaataccagctgatcatggaatgcaggagcagcggtctcactgattttcagtgatgcaaggaacatgggattcatcccgggaccttttacaactgggtcagcagactcagaaagaaagcatgccgtgagattcctgaatccatttccaaagcagcaccatcgcctgcccaagaggtagtccgtttaaatttcaatccaaaggcagaaaggccggaatccatgtttccagtccagccagcgttagaggatccatacagaattccagaaatatctgcaagcatagagatatcgcttggcagtgcgacgatccgtattgccaatggtgcggatcctgccatactggatcgtgtcctaagccttgtaagaggcacgatatgccaggcgatatctccatggcggacaacatctatatcgtgtgcggcgcaactgatatgcgcaagtccatcgatggtctctgcagcattatccgggataaactttctatggacccagaccagtcctccctgttcctgttctgtgggaaacgatgtgaccggattaagatcctgctccacgaaccagatggatatgttctcctttataaaaggctgagcgtcacacagggccggtaccgctggccacggaaaagttccgaagcccaggcaatcacctggcgtcagttggactggttactcagcggactggacatcgagcagcccaaagcaatccagaccagtaaaaaaacatcgtgaaactgccgaaattttccggcggcatttcgactggacgtgtggataaccgctttgttttttcgccagatcgggataacctctgcgtgataactgtttcatcggaactcatggtatttcgagggatccatggcggtaaatatcctggtttatccagcttttatctgatatccggatcgtttatccaccgtcattatgacgaaagcgcagccaggactgattcgcttttttcttcgttttctggtaaaataccagtaataaaacaaaggagcggacactcatggcatccggtgcaaaggatatccagttcagggagctgaaggatacaatctcacaattaaatatgacgatccgtacccagaatgacctgatcatatctttgcagaagatgctcgaagagcgtaatgcaaaggacgatgaaaaagaccggatcatttcaaacctgcaggcgcagcttgaatacttcaagcagaagttatttggcagttccagtgaacggcgcagtgatctgcccggccagttaagccttttctccggatccggttccggggaggaaccattgccggagctcattgagccggagttcaccgaagttaagaccagcaagcaggaacgtaagcccaaagcggactatgatgagatgttcgcaaatcttccaatccactatgaagaagtaaatacgttgtccgaagaagagaagcagtgccctgagtgcggagccggcatgatcccgaccggccatgaagagatacggacagaactccgttataccagggcaaaactggagcgtatcgtgtacattgccaccacttgtgggtgtccagcctgtaaagacacggaggatccgcggttcatgaaagacgaagggagcccggcacttatcccaggcggatatgcttctgcatccctggtatcacatatcatgtatgaaaagtatgcagatgcgcttcctctgtaccggcagaagaagggatttgaacttcttggagtcagtatcaacagaacgaccatggcgaattggatcatcacctgctcccagaactatctgaagcccatatatgattactttcaccgggaactgttaaagagacacttcctgatggctgatgaaacaccgatccaggtcctgaaagaacctggccggcggccacagaacaagtcttatatctggctgatgcgttccggagaggaccggctccctcccattatcctgtatcattatacagaaaccagagccgggggaaatgcagcggactttctggatgggatcgatgaaggttcctatgttatggtggatggttacagtggttataaccggttgaagaagatacgccgctgctgctgttacgcacacatacggagatacctgatggaagccatcccgagcggccaagagaaagactacagtcatccggcagtacagggagttctttactgtaacaagctgtttgaatacgaacgaagctataaggcaaaaggactgtcctatgcacaggtgtacaaacgccgccagaaggaggcaaagccggttgtggaatgtttcatgcgctggctcgatgggcagcatccagaaaagtggagccgcatggatcgggcagtaacctatatccaaaatcgataagacactttgatgatttacctcgaagacggacgctgcagcctgagtaacaacgccagtgagaattccctccgcccggtgacattgggccgtaagaactggctgttcagtgacagccaggatggtgcaaatgcgagtatgatagtttataccatggtagagatggcaaaagcccacgggcttcacccatacaactatctaaaatacctgctcgacagccgccctggaacggacaccagcgatgcagagttcaaagatcttgcaccgtggagtgagaaggccaggatagaatgtaacaaaaaatcagagtaaaacgctcactaccctgacatcaaatattgatgccagggcggtcgtgttgggataccttaacacttggcgcttactaagatacaataatctcaagcagaaaagaggaaatatcatgccacaaagttacgaaccagaatccaaaaagaaaattgttcatctccatatcgaacaggaacgaacctacaaaagtatcacagataaatagggtgtatcaaaagcaggcatctccaagtggtgcagtgaagttagtgaagaatgccaagccaaagcccagttgcatccagaagctacgaataagatggaaatgatgaaagaaaatctctagctacgcaaagaacttgaagaggcggaaaagaggttcttttcttaaaaaagcgacggcattctttgtaaaggagatcgattagaggcttatcggttcattcaaaaatatcacaaaatatttggagtacgatggcttctgcgtcgtataggcatcgctcccaatgcatattacaacttcctgaaagagtggaaggcggattcctatgccccaaaacagaaggtataggagcagattcaaacgatctactatgaacacggcagtgtcgatggttatcgaactataaaaatctatttggaacgcaagggcatccgcctgagtaccctgaccgtccataaatatatgaacaaagaactcgggctgacttcggttgtccgtcgtataaaaacggattacagaaaagggacagcatacaaaatgtttgaaaatcttgtacatcaggaattccatgctcctgacctcaaccagaaatggtgtactgatttcacctatttgtttttagcgatgggaccaaatgctataacttctctgtcattgatctctatgatcgcactgtggtcgcaagcatcacggataagaatatcacagcggatctcgccgtgcgaactgtggcgaaagcacttaaatcccagacgggcatcaaaagtaccttaattctacatagtgaccaggggagccagtatacatccagggactttgtagaattctgtgaaaaagcaaggattacacagagcacttcatacgctggctcgatggccagaatccagaaaagggggccgcaaggacctggcagtgatatatatccgaaaccgaaaagacactttgatgacttacctcgaagacggacgctgcagcttgagtaacaatccattggagaattccctccgcccggtgacattgggccgtaagaactggctgttcaatgacagccaggaaggtgcaaatgcgagtattgtagtttatactatggtagagatggccaaagcccacggcttcccccgtataactacctgaaatacctgctcgacagctgctctggaacggacacaaccgatgcagaactaaaagatcttgcgtcgtgtagtgaaaaggccgggatagaatgttacaaaaatcagagtaaaacgctcgccacgctgacatcaagtattgatgctagggtgcttgtgttgggataccctaacactcggcgcttacagtaagactcaagcaggaggattttacggcattttgaaatgggagaggacactattctcaaaaaagagaggtcagatcgtgttggagtgattttgcataaatacaaaaactaaaagcgaaatccctgcctagagaaaacaagaattgacagtcctctcaaaaagtgatatatttgtcttgaaaagagataaatatatcactgagaggagctaccatgcataaacaagattctataaaacaaaaaccacagtacaccagaaaaatcagcccgaaacttggactgctcggcttcttcggcctctttggatttctcggattcgtcccgcagttttttggagagagtggagtcttagatgtaccctttccactgatatttttctgcttcttcggattttttggtttttattacgagggaaagatgtcgggaattatgattgacgagcggtatgaggctaacgttaaccgtgcagcggcgatcgccaacagagtgtctctgacgttgattattatggcagccattttagcactctccctgtttcggatccatgattcttatggtatgctgaaactgcttcttgcgatcatcggattcgcattcggcctttcgctgtttcttcaggagtatttgctataccgcttcgaaaacgaggagtaggagatcatggcagaatttacatgtaatttaaaaaaatacagactgcaaaaggagatgacccaggagcagctggcacagataaccggtgtaaggcgggaaaccatcatgaggctggaggcaggtaaatataatccctctctaaaactggctatagatatatcaaaagctgtagaagcccccattgaagcgctgtttatctttgattaagcgtattaagatactgtgggaatttttaagtcgcaaatgtaataacagaacacatagaacactgaaaaagaccggcagatcaccatccaccggtcttctttatttccttccaatccccagaataaaaataattaatctccgctcccagaaacaaaatacaaatacacacatacagccacagcatcaacagcacaatcgccgtaaggctgccatacataacggagaaattactaaaattattaaagtaaatagaaaatgcaaacgaaaatgcaatccagcccagtgtcgaaaaaacagcgccgggcagctgctttttgaaatgctgcttcttttccggtacatacgtatagagaaaggtgaagcagatcgtcaggatcaataagagcacagtccgaaagctgatgacgtaatgggtaatctctgcgataaccggaaaatggtgttcaacaaatccctgaatcgaacttccaagaaccagaagtaccagtgtcaagatacagataagcataaacacaatcgtataaccggcgcatatcatccgcgtcaccacataatttctttttttctgtttcccgaatacccggttcagtccgcgctctatactcagcatgccgcgggaggccgaccagatggcggcgattgccgtaacggataagacagtggcgggagagttggtgtagatattttcgacaatgccaaagaccaggctctttaggttggccggtacgatatttgtaatgaccatcagcaggttggactttgttatcgttggtatcaactggatcatggccatcagcagcatgatgaacggaaaggccgcgatgatggtaaaaaaagacgcctgggccgcataaaccgtcatttcatccctgctgaatttgtcgtaaatctgtttgcctcgcagtattaatccaatcatgatatccccttttagttaatgatataactaaaatattaccatgcccgtaaaaaaatatcaagcgtgaccccagattttcaaataagggcgtaacagttcagccttcacttccggctgccgctgtctggcccgggctttcgtttcccgaatctttccagttccggtttcgggcataagcatttctaaatgtgcagtatttttctaaaagccagtgaaaatccccaaactcgcttcgctcagccaggtggggatttcccctgaacgaaaaattctgcgcattaagaactgctaaacactccgacgaatgacaatgagggggactctccgctaccctgcaaagtcacaggaaagatccgggaaacgaaagcccgggccagacagcggcagccggaagtgaaggctgaactgttatataagggctgtactttgcctaagtgcttcccactaacaaaccaattattttgaaaaacaaagtaattctttcgaaaatgagttgcccatcattgcggcatttgatagaatggtactaatggaagcaatcagaaaaggagctcctatggaatatatacctgcaaaaaccattgtaacgaagacgaagagctccgaatggttcggcatcgattataatatgaatatttataaagggtgctgccatggctgcatatactgcgacagccgttcctcctgttaccggatcgagcggtttgacacggtacgggccaaggaagacgcccttcggatcgtccgggatgatctgcggcggaaggtgaagaccggagtggtgggcaccggagccatgagtgatccctataatccgtttgaaaaggagctggaactgacgagacacgctctcgaactggtggacgctttcggcttcggcgcggggattgcgacgaagagcaccctgttaaaaagggatgcggatattttagagagcataaaggagcattcgcccgtgatcctgaaggtgacggtgacgactgcggatgacgaactggcagggaagattgaacccggcgtgccgtcctcaacggagcggtttgaactgattgattatttaagaggcagagggctgtttaccggaatcctgctgatgccggtcctcccgtttctggaagacagtccggaaaatattcgggctgtcgtgagaaaggctcatgaagctggagcctccttcatctatgcagcttttggggtgacgctccgcgataatcagagagagtggtactacgataagctggatcagctgtttccggaacggaagctggctgcggaatacagaaaacggtacggagaacgctacgaatgccggagtccggcggcaaaacggctctgggccatctttgcggcagagtgtgaaaaatacggaatactgtaccgtatgaaggatattattcacgggtataagaagaattatgaaagcagtcagatgagcctgtttgattttttgcagtgagaagagagaaagcgaaaggaaaccttacatggaacaggagaaaaaagaaaagcttacaaaaatggagatagactggattctgtacgacgtgggaaattccgccttcgttctgctggcaacgactattctgcctatttactttaattatctggcgggactggccggtatttccgaggtggattatctggcctactgggggtatgcggcctctgtggccacgctgctggtggctttcatcggtccggtctgcggagccattgccgacacgaagggctataagaaacctatatttacgatctgtatgctggtgggcgttgtgggatgcgctgcgcttgccataccgaaatcctggattgtatttttggtggtatttgtcattgcaaaggttggctactccgcgagcctggtgttttatgactccatgctgccggacattacgacgccggaacgcatggatgcggtttcttcccacggctttgcatggggatatattggaagctgtgtgccgtttgtattcagccttgtgttcgtactgttttatgagaagattggtattaccatggtaaccgccatggtgatagcacttatcatcaacgccctgtggtggttcctggtgacagtgcctctgctccgccattacaggcaggttcactatacgaaccgtacggagacggagcgcggagtggtgacggagagtctgcgccgtctgggtcaaacacttcttgatttaaagaaccataagaaaattttcgtcttcatgattgcgtatttcttctatattgacggtgtctacacgattattgagatggccacagcctacggaagctctttgggactcgactcccagggactgcttctggcccttctgttaacccagatcgtggcgttcccgtttgccctgttatttggaaaggcggctaagaagtacaggacggaaaagctgatccgcctttgtattctggcgtacctgtgtatcgcactctatgcgatccagctggataaacagtacgagttctgggtactggccgtatgtgttgggatgttccagggagcgattcaggcgctgtcgcggtcgtattttgccagaattattccacctgagaaatcaggagaattttttggcatcttcgacatttgtggaaagggagcctctttcatgggaacggcactgatgggattgttcgcccagatcacggggaagagcaacggcggcgttgcaattctggccgtgatgttcctcattggctttttcgtgtttggaaaggctgtgaaactgaatgaggataagggagattattgagtacctgtcacatcaaaataattcacaaattctttggctatgttcgatacatagccattttttttgtatatggcagtcattcgggtaacggtttccggggaatcgatggtccggaccgtcagcccttccgccgttttcatactgctgatggattccggtaccagggctacgcccaggccggcgccggcccactgaaggcacgttcgtgcatcatcgttgcggcagaagatatcgggcaccgcaccgatattctggaatgccatggatatgatggcgtcaaagcgccgataatagatgagaggttttccggccagatccgtaaggcggatgctgccgtccggaagcgcatcgaaccaggaggatactccgactgccgtaagcggctcctctgttccaaagacgcagtgtaagccttccgtattgaacggtgtgcggacaacggcgcattcgatgatgccgtttttcagcttctccagaagctcataggtgttcccctcggaaatttcgaagcggacattcggatgaaggcggcagaagcccggaaggacgcggtctgccagatagtctccggaggaggagatcgttccaagctttaggattcccttcgctgaggaaggaaaattctgaagctcgctggcggccgtatccatcatggaaaggatatccctggcccgggaatagagataggcgcctgcctcggtcagctcggcttttctggcaccgcggttcagaagacgcacgcctaaatcttcctccagcatcataatctgcttgctgagcggcggctgtgacagccccagcttctttgccgccgccgtaaaacttcctgtttccgcaatcactgtaaaataatacagctgccttgaattcatctgtcccatggaacttaccccttctataaattatttttatatcattgatacttgtaatattataccagaatgatataatattacaatgaattattcttaaaatatatgaatccggaggaaggataaatgaaaaaactcctgaaatacttaagagaataccggctggaaagcttcttagggccgttatttaagcttctggaggccagctttgagctgatggtgcctcttgtgatggcaaaggtaatcgatgtcggaatcaggacgcaggatctcccctacattttgaaaatgggcgggattctggtgctgctgggcgttgtcggtctgatctgttcgatcacagcccagtattttgcggcgaaagctgcggcgggatttggaacggcgctgcgtaatgatttatttgcccatatcggcagcctttcctatgcggagcttgacaaagaggggacggccacactgattacccgcatgacgagcgacgcgaatcaggtacagtcaggggttaatttatttttacgcctctttttgcggtctccgtttatcgtgttcggagccatggccatggcatttaccattgatgtgaaggcagccctgatttttgttgttgtgataccggtcctttcccttgtcgtgttcggcatcatgctgatcagcatgcctctctataaaaaggttcagagacagctggaccgtgtgcttctgactgcccgggaaaatttaagcggagtccgcgtcatacgggcttttaaccggcaggaggatgagagccgccgcttcgatggagaaaacgggaagctggttacgatccaggtatttgtcggcaagatttcctctctgcttaatcctcttacctatgtgatcatcaatctggggattattgtactcatccagaccggagcaagagaggtcaaccgcggtgcaatcacgcagggagaggtggtggcactggtgaattacatgtcccagatcctggtggagctggtgaagctggccaacttaatcatcaccatctccaaagcgctggcctgtgcgaaccggatcagcgccgtgttcgagcagaagccgggaatcacggagaagaatcatacgtgtctggaggccggagaggacgctccggcagtggagtttcgggatatgagctttacctatgacggagcgagagaaccggcattgagcggcatttcatttactgtgaagcggggacagaccgtggggattatcggcggtaccggttccggtaaatcgacgctggtcaatttaattccccgtttttacgatgtgacggagggcagcgtgtatgtggacggccacgatgtccgggagtatccgctggatcagctgcgaggcaagactggcgtcgtcccgcagaaggcggtgctgttccatgggacgcttcgggaaaatatgcagtggggcaagaaacatgcatcagacggggaaatatatgaagcgcttaagactgctcaggcttttgagttcgtggaggaaaaggacgagggcctggaactctatattcaggcaggagggaaaaacttatcaggcggtcagagacagcgtctaaccatagccagagcactggtcagaaagccggagatcctgattatggacgacagtgcgtcagcactggactttgccacggatgccaggcttcgaaaggctatgaaagagagaacaaaggacatgacggtatttattgtatcccagcgtgcaaccacggttcgaaacgcggatcagatcgtcgtcctggatgacggcgttatggcaggatgtggaactcataaggaactgtatgaaacctgcgagatttaccgggagatctgtctgtcgcagctttcaaaagaggaggtgcagtagaatgaatatgaaaaagcataaaaccaccatccgccggatactcaccagcataggccggtataaatggggggtactggcttctctggcctgtgcgtttgttacggttgtactgactctctatgtgccgattttaaccggtaaagcaatagactgtatccttgctcccggaaatgtggattttgcgctgatgagcagaattcttttaaagattggcgtgattatagcggtgaccgcggtggcccaatggcttatgagccatatcaacaatacgatcacgtaccgcgtggtaaaggatatccgggtccgggcatttgcaaagatggagaatctgccgttaaaatacatcgattcccattcccacggcgatatcatcagccgtctgatcgctgacatcgaccagttttccgacgggcttctcatgggctttacccagctgtttacaggcgttcttacgattttaggaacactgatattcatgtttacgatcaatcccgccattgccgtcgtcgtgatcctggttactccggtttcgctgtttgtggcgagcttcattgccagaaggacgtataccatgttctggaagcagtcacagacgaggggagagctcacttcccttgtggaagagatgcttggcagccagaaggtggttttggcatttggccatgagaaagaggcgcaggcgcagcttgaagaaatcaatgaacgcctcagagtgtgggggcttaaggctacgtttttctcctccatcaccaacccggcgacccgttttgtcaacagcctggtatatgcctgcgtggggattgccggcgcgtttgcggccatttcaggctatttaacagtaggtcagctttccagctttttaagctatgcaaaccagtatacgaagccgtttaacgagatatccggtgtggtgacggagcttcagaacgcgctggcctcggcggcccgtgtctttgaactgattgacgaggagcctcagataccggacgcgccggatgccgccgttctgacggaggtaaagggggaagtgtctctgaacaatgtgaatttctcctatgatccggaagtgtccctgatcgagaatatgaatctggaagtgaagcccggacagcgggttgccatcgtagggcctaccggctgcggaaagagtactgtgattaacctgctcatgcggttctacgacgtggattccggctccatcagggtggacggaaccgatgtgaggaagatcacgagaaagagcctgagaacgagttacggcatggttctccaggaaacatggttgaaatccggcacgattcgtgataatatcgcatatggaaggccggaagcgtcggaggaggaagtggtccgggcggcgaaggaggcccatgcccacagctttatcaagcgaatgaaggacggatatgatacggttatctccgaggacggaagcaatttatcccagggacagaaacagcttctgtgcattgcccgggtcatgctgtgtctgccgcccatgctgattctcgacgaggccacgtcttccattgatacgagaaccgagatacggattcaaaaggcgttttccaagatgatggaaggcaggaccagctttattgtggcccaccgtctctcaaccataagggaagcagatgtaattctggtcatgcgggacggccatataatcgagcaggggactcatgagagcctgcttgaaaagaacggtttctatgcagaactgtataacagccagtttgccgtgtgatcggatcagacagaacagaggtgattgtacaaatgaaaaaaacaggacactacgcggcttttatcggacttttatcggctgttgcgctgtccgtgactgcctgcggcgctccggcgaaagcaccggcggcggctggagcagcggagacagatacagcggaggcaggtgccgtgtcagacacggcaggcgcaccggaatccgccggaacagacacgaataaggagaatgcagcgggctttcaaaagatcgatacggctgacaacggcagctccggagatacagctgctgcaggaaacgaggcaggacaggtacaggctgttacaggtgccgttccggccgacggagaggtgctttcgggtataccggtagatgctgaaaaatcggaggcagtttccatttattatggctctgtgtgctattcgttcttcagtgaggacagagacaggattaaagaggtggctgatttatttacggggttttctctcgaggaagttcccaatggacagctggatgaggcgactacgtaccagatttacttttcaacggatacagaacagatcgcagccattaacgtggataaaaacgggatattctatattccggaggagaagaagttttataaggtaaaggcaggaaccttccactttgaaactctggatcagatttataaagacagtatgtatgcagatgggtttgatgagaatcagtgtctgatacagtagtaagaaacaggagaaaaggatacgccagtcttccggttcgcaggaagactggcgtatcctttttgtctgctgccgatctgacagatgagcctctgtctgtcagcggatcatgaccccatccttgaatacatgaaccggtttctgatacattgcagtgatatcattgaccggatcaccgttgacaacgatgaaatctgcgaatttgccggcagcaatgctgccgatcttatcatcgacgcccatcaaaatggcgctgttaatggtagcctgtttcagtaagtctatattggagaagcccagacggtcttttcttgccttccactcgatataaggagttttttccatggtcatgatatccatgtctgttccccagcccataagaatgtcgtaattttccccggcgttgcggatacaggcgtctcgttccgcgctgatattctcaaaccggtcgtaaacggcgccgctttctctcgtgattccctgtgcctccggcagactgcaggagatggtgggaacgagaccggcatctttgcgtccatccagtttcctgcaggtttcatccgatatgaagctggcgtgttcgatcgtacggacacccagatcgaccatgacatcgcaggcctctgcgccatggcagtgaaccgcacagtagctgcctcttaacctggcgacggcgacggcctcggaaatctcatcctccagcatgatccgtctgccgggcatgctgtcttctaccagcatggagccggttccgtaaagctttaagaaatctgctccgtgatagaactgatttctggcctgactgcgcatctcttctttattgccgtagaatgcacacatgaactcaaacgtgttaaatcctgccgtcaaagggacgatggtcataccggaacagaatacccttggtcccaccacgacgccttcctggatggcatttctcgtggcgattccgcagtaattggattcgtcgccgacatctctgatcgtcgtatacccgttgtccaaaaaccatttggcaaaggcataggcatcataggcccactggctgggggccatatcccggtctcccagggtgaaaccgccggaacgcttgccgttaaaaagatgtacatgggcatcaatcagccccggcagcagggtggctccatctaagtcaatcacttcgtggccgtctgcatcagcactgccgcagggaacgacagcctcaatcagactgccctttacgatcacgtctgccataacgggagcattggcttctgtcagttctggaaccagcttacaatttttgagaatcatgttttactcctccttttggtttgcatttttatatgttttctataacctgctttaattgttatgatttcgctggatcggcggcctcttttgcacgctgctttttcagctcagccttcagccagaaggaggctaatacgaagatgaacaggccgactaccgcaatgctgaaaatgtaatagtaggcattaccgcctttcgtatccatccagtggccgatcagggccggaaggaaccagtcggagcagtagccaaagaataagtacaaaccaccgactacgcccagaatctccagaggtaccttcagctcggcaaccggaatctcacataagttgttgaccgagcggtatgtacaggtgagaaggagagcgacaattacggctggaaccgtataagctgcgcctctcgggatgaacataaatacaatgacaagaatgatggtgggaattccaagggaaacgatcatccttgtggtgttattgatcttgtcacggatcataccgcctaaaggagcggctacaattttgataccgtagcgaagcaagatgccgaaaatggaggcaaatgccgcactcatggcaaactcggagaccatatagggattgatgtaattgaatgcggtggacgtaatgtatacgccgaaggacatcagtgcagttatccacatggccggtatcttaaggccgaccagataattcttaagtcttaccggttcaccggtactgatgacatacgtggcggcatattttttgtagtcgtaggtgatgataaagccaacggttccgattgcgtagatgatgccgaataccagaaagagggtgcgcatgccggccggagttgccagcttatcccctaagagtgcaaccagaccaaccatcaggccgagagaaagaattccgtcgatgcactggtagatcccgttgattgtcccctgctcgctggcgtcgcccagcatacggcgaagctttgccgttgcagaccagaagagaagccccagcgtaatggacaaaacgaaaaagcatatcagcagaactctgtacggcggaatggtcgccataataaagaccaccacggtggagctgatacaggcgatggacatcagaagcttggaattaaatttgtccgcaatgatgccgctgacaagataggcgggaattgccaggctggcataagcggcagtcaggcttccgatctgtgtgttggtaagatgaaatacctgttggaaggcggcatagaacattacggggaaaaagataacgttccccacatttgcggcgatggagtaaaataccaacggccagaagcgtttacctagttttttcatacaagcaccctttcttgaacataaataatttgtttgattgaacatattcaattataagcaaaaaaaatacagcctgtcaagcaattttatgagttgaaagcaatttactcataaaattgtatgacaccaatgcagaaaatctgcttttcaggctgagaatgaagaataacaaggttgaaggaaggggctgccaaatgtcctgctatcgaagataggcgtcgcttccatagtaatttgtcaggaattccttgctcctggtgacgatggaatagatctgttcgtcatcaaggcccagattataaaagtaattggaggtggtaatatccatgacgtcctcccgcgtaatgccatactgccctttatggtggtgcagcatcagttctctcgttgcgccgcggtttgcaatcatatacatggtgttctccgcgctgctcactaaaagtccgtactcctcgatgatgtcatttaccattttgagatagttggaaccatttaaaaccttctgtcccagagagttttcataataactgtagtagaagcgggaataggcgggaacctcgtcgatcttcagccactccatatagaccgtgatataaaaacgctcgccgctggccagattatgaaaatcagtctgtcccagctcttcggccacttcatccagaaatctggaacacacttccgcagccagattctcttttgaatcataatagtaggagatgagactggaggccacgccagctctctctgcgatttcccgaaaggttacgccgctgtatcccttttccataaaacactcttttgcagccagaaagatggcctgcgctgtcgcagaatcggcaacatcacactttttcctttttgcaggtgctttcttaaatctcataaaaatcagtcttcctttctgaaaatgaaagtatcttgtcttttcattgtaaaggaggttctcctaaaaagcaagcgcattcaaataaaatatgattgacgttctaagtttcatacagtaaaatactaaacatatacatcaaataaaattgaacatgattaacaaaaggagaggttagtatgtttacatccggattaggctctgtcgatattgccgtactgattctgtatatcgccgctattatttccattggtttcattgtatccaggcgggtgaaaaccgtaaaagattttacatctgccggtcagtcgctcagccctttagttatgattgcctcctgcctggctacctttttcggtgcatttgccgggtcgggagccatggagatgatcggccagttcggccttacgacgctcacgatcctgctgggggccaatgtcggctggtttgtgatggctctcatggcggggaagatgaggaaatcgggggcgctgacctacccggcttatatccgcagactgtttggggcaaaggcgcaggcagcgtcctccatgatcagcgttgtttatctgatgggacagatcgccgggcagtttgtagcctgcggtacgatggcgcacctgctgggactgtgttcttttcaaaccggtattgtggcgggcggtatcattatgattctgctttcggttagcggcggtctgtccagcgtcacaattacagacagcattcagcagatctttattaccattatgtgtgtgatcgttgttccgattctggccttttctaatgcagggggactaaaggcggtggcggcagccacggatccggttaaaatgtcgctgtttcagggagcgccctctgggtatgtcattggcacgttcctctcgctggtgctggcgtattcctgtgaaccttcctttgcacagcggatttttgcggcaaaggatgagaaatctgtagtaaaagagacgatgttcgcgtgcctgctgggatttctctttaccgttcccatgtggggagctgccctgacgatgccgattctgtttccggaggaatcgagcctggtctttttgccgctggtgatgaaagcttttcttccgccggtcttaagaggacttggcattgcagcctttatcagccttctcctgacaaccggcaacgcgctgcttgtatctgaaacctccgtcatttcaaatgatattcttccgcgaatctggccggatgccgatgagagacagggacttttgatcagccgcggcgtggtggttgccctggggggcctggcggtaatcctggggctttatttccagagtgtctgcgcggtgatgctgctctttgtcggaatgtacggcgcatcgattttcccgccggtgcttttaagcgtggtgtttccgaaacgcgaactccggtctgaaacggtggctctctgtatggggatcaccgctgttcttaccttgacgctggatttgattccggcgtttcctgcagagggaatctttattggggtgccggttcatctgattttactgcttggtctttctaaagcggaaagctggaggatagaaccggcgggggaagaagtgcaggtttagggtaaagttctctgaatttgaaaaattaaaaataaatggaaaatgatattgacaggcagggataagctgtttataatgaatatagaaatcgttttctataggagcgtgcgatgtgaaaaatgttacgataaaagaagtggcagcccatgcggggatgtccataacaaccgtgtcgcgggcactcaataataattatccggtgagcgcggaagccagggaaaagattgagagagcagtatcggaactgggatacaggccgaacctggtggccagaagtttaaagagcaataataccggtatcataggcctggtggtagcagatatttcgaaccgtttcttcatgaaggcggcaaggaagctggaagacgtcgtttctgctcagggatatcagattatttatgcgagcagtgacggaaacgtggagaaggaacaccagattctctccatgtttgaggagcgctgcgtggatgcactggtgatcgcttcctccgacagcagttcttcccgtttaaacaacattgccgcgaatggaacgccggttattgcaatcgaccgtaaggttccggggcttcaggcggatattgtagtggaggacaaccgggattcctcttaccagctggtggaagcgctgatacagagaggccacagggagattgcagttaataacgtattgatgaatatcagttccggtaaggaacgactggagggcgtccggatggccatgcaggcccatggactgcctctgagagaggaatgggtcagcaaaggtggtttcacaagtgatgatgccagacagtgggtgaagcagatctttgacggggacggattaaagccaacagcagtattctgtgccaataatgtgatgacagaaggcaccatgctggctttggaggaactgaatctccggattccggaagacgtatcggttgtctcgtttggggaactgccgatgcaccagctgattcagccgcagatcgaatctgtggttcaggatccatttcggattggacagctggcaggagagctggtcctaatgaggctgaaagggcaaaatgaagagttctgccattatgaactgcctctgaaattaaaacatggtcattcaattcggagccttgtctgagagatgtctgcagatagagtatgaccggagcgtgggaaggaaagaacggagcagacggaattcagctgaatccggtttttcttcccgtagaaactcattatttttttaaatcgatagaaaacgttttctataaaaggaggcaaataatgattgttcaattggatcgactatatgcggatgccatgaaacgccgatatattgtgggagcgtttaatgtatttaattatgacagtctgtgtgcggtgctggaggcggcggaggaagagcagtcgcctgtgatacttcaggtgtctatgggggcacgaaactacgttccggacttcaggcagtttatagaggtcatgaagattgccgcttcaggagtatccgttcctgtaggaatcaatcacgaccactgtccgacggcagaagcggctatgcaggcggttgatgcaggtgtgggtggcgtcatgtttgatggatcccatctttcctttgaggagaatgtgcggtttacgggagaggttgtggagtatgcccatacaaggggcgtttgtgtggaagcggagctgggacgcctgccaggatttgaagacgaggtctttgcggatcacgtggaatttacaaacccgggcgcggcgaagcgatttgttgcgctgactggctgtgacagcctggctgtgtcggcgggaacctcgcacggcggagtaaaggcggcagaaaatcttcctctgcatatggaggttctggaacggattcaggctgaactgccgggatttccactggtattacacggagcggcttctcttcccatgcacctgattgaagctgtaaatgaacagggcggtcgtgtggaggtgatgaaaaactgcagtgagagcagtatacgccggtccgcagaatacggagtttgcaaggctaatatggatgtggacaatttccttgcatttaccggcgcggtgcgcagagttctgaatgaacagcccgataaatacgatccccgtgtctatttaaaacagggaaagaatgcatggaagaaagaagtcatgtggaagatgagtcaggtgacagggagttccggccacaactgggtgaaagagggggtgaggcaatgatacgggcgatttgtttaaacccggtgatcgaccggtcatatcatgttaacggctttgaaccggggaaaaaatattttcacctgttgagagaggtatccataggagggaaagggattaatgtagccaaagtatgcaaacagtgcggggagcctgtgacgctgtacggatttatcgctggcagcaacggaaagatgatccgggcctatatggaaaaggaagggattgatgcctgtctgatcgagataaacggaaatacgagagagacaattaatatcatcgatctggaacaggggagggagtccgaactggttgaacaggggccgactgtagaagtgagacaggtggagcagctgctgtgccggcttcgggaggatttgcagagagacgatattgtgatctgctccggcatgacgattgaaggcgcgccggctgacctgtacagtgaaatcagcgcaatgtgcagatggaaggaagccagatgctttctggatacaaacagcgttacggtagaacaattgagaaaagacggttattatttttataagcccaatcttcaggaattatttgaactgtttgggcgggaaccggtgtctgaccgaacggcagtcagaaagctggctttacagcttgttcaggatggagtggcctttgtgttggtttcccttggggcagaggggggaatcctggctggaaaggattgctgctgggaagcaaaaatccccagtgtagaggtgacttccacgataggaagcggagattcgacggtggcaggatttgccataggcttgagaatgggctggagcatggaagagatatttcgcttttccatggcctgcggcatcgccaatgccatggaaaagcaggtgggaagagtggatccggagcggttggaaatgataaaaaataagataaatatagagaatataccaaataaggaggtttcacatttatgaaaaaacgagggttagcaatggggattgctgtagtattggggtgcatgtcactgactggatgcggcggaaacagcaacgaagcaaaaaatggggaaacggcagcagcgacgagcagggttgaggcaaaaaatgagggagaaatcgagctcacgatgatgggaggagcccatcttgtatcggtggcagagattgtactccgggattatttggcagaacatccaaatgtgaagatcaattttgaaaaatactcctatggggaatatccgacaaaaatgaagcttcagctgtccaacgatgaaagtacgccggatattatgattgtacatgatctttatgcgccgcagtttgccaaggcggggtatctggtggatctctcagatatgtttacagagggagaggttcttccggttatggatccggtaaccatggatggaaaagtatatggaattcccaatcaggtgaccaaccaatatgtatttatgtacagacaggatatttatgatgaactggggctgacggtgcccgaaacctttgatgattattttaaccaggcagtagcgttgaaggaaaacggttattatgcaggagcatttgatccggcggacagcggctgcaacgaggtatttcagaattttatctatatgctgggaggccaggtcctcgattcagagggcaatgtgtctctggagaaggggaaagaagctctggaactgatgagaaaatgctatgacgccggtatctggcatacgagccagcagggcaacagcgaagcatactggaccgctttcaatgcaggtaagatcgccgcgtttccatccgtcgcagcacacgcagcttactatgtgacgaatgtggatcctaacggccagggcggttacggtcatctggcgattgcaaagccgatgaaatttgcggaagatgggagagagacgtatatcaacaatacggagtactatgcgatcaataagaatacggaacacttagaggcggcaaaagatgtagtccgttatctggcgcttacgaaagatgcggccgagaagttttctaatgttaacgaagacggagttatggcgcagtatgcaaccgggtgcatggaaggaatccgcgccatcgcggcaagcagggagaacggctgggaggcgtttggcggagaacctgtagtttcagagctggcagaaatcctcctgaatacggatcctgatattccgttcgtggatgagagaagcaacgagataaacaatgtgctgtctgagattattggagagatgttcttaaacggggcatacacaccagaaactgcagttgaggtcatgaaagagaaattaaatgacatctgataggtttgaccggtttggaggctgatgaaatgaccagtacattaaaagaaatgaaaaaatataaacactgttatctgtggatcgcaccctttttcattctgtttgcagtcttttatatttatcctgccgtcagcggttttttaatcagcctgaccaatttcgatggtctgggaacggtggcggccgctgaccacattggatttaaaaattatgaaaaactgctgcgggatgacaaattctggaagtcgttgatgaatacagtcttaatctggctctatatcgttccgctgcgtacatttctggccctgattctggccgcggtcctgaattcctccagactgaccggcaagcgagtgtattcggtgattgtccttttgccgtatatcactgccgtcgctgtagcagcaattatattccggattttgctcaccacagagggaggactaattaacgtactgctggaacgctgcctgggtatcggtcctgtcggctggctggataccactgctttgtcgaaagtctctgtggcatttatgaacatatggcgaatgaccggttatttctctctggttctgctggctggaatgcagaagattccaggctctgtgggggaagccgccagcattgacggagccggagcgtttacgaaattttttaaaattacacttccgcttatggttccggagatatttttcgtcgtgctcatgtcaaccatctggattttccagaatgtaggcgatgtgatggtgctgactcagggaggtccgatgaattcatccactacgctggtatactacatgtaccagaatgcatatgaatactcaaaaatggggtatgcggcggcgattacgtatgttctgtttgcatttctcgtaatactcagtgtctttgttgtaaaaaattattatggaaggacggaggagtgacaatgaagaaagagaaggctgaaaatattttaaaaaagctgttttccctgttgatgctgctgatcgtgatcattgtcacttgttttccgttcctgatgatgtttatgggaagctttaaggaagattatgaaatattctcgctgtctccgaagatccttccggcagccgggttccagcttaagatgtaccgcatgctgtttgcaaactggccctttgtaaccaatatgatgaacagtgttattgtcgcagtctctacaaccgcactggcctgttttttctgcacagcagcaggatttacctttgcaaagtatcagttcccgtttaaaaatgtgctttttatcattacgctgtcatctttgatgataccgctggagacgaggctggtccccacgtacttactggtaaagcagctgggaggcgtcaatcacttatggtccatgattttacccaatgcgatacctgcatttggaatctttatgatgaggcagtttgcctccggtacggttccgcaggaaaccatggaggcagccagaattgagggagccacggaaaatcagattctgattcggatcggttttcccatgctgaagccggccattgtatctctggctattctgacctttatgaatacctggaatgaattcctgtggccgattatcatcacgaccaaaaaggaaaagctgacagttacagctttgctgaggtcgattggagatgtctccatgaacggcaattacggagtgctccttgcggcggcggcactcagcgctctgccgattctggttctttacctgatttttcataaccagatgattgatgggattgtggagggaacagggaaggagtagaggctgggattttgaaatatgaagactgagcaaaagaaaggaaaagtgtacgatgaaattaccgaaagaactgctggaagtggagagaaagacggtggagaccgtaaatctgccttcagataataaccacgatccatccaatatactgtatgatcagggaacgtattatttgtggtatacacagcatgataatgagcggccctatgatcattttgccgattgtaagatcatgtgctgtacttcaaaagacggcattcactgggaagagggaaaagatgcactgcttccggcggaaagcggctgggactgcgcgggagtcctgacagccaatgtgatttatgacaaaggaagattttatatgttttataccggtgtgggaactgatttcgctgaggggaagactacgagaaggtgctgcggcctggccgcagccaatacaccggacggaccgtttgaaaggctgggaaatgagcctgtgctccagtgggaagaggagggaagctgggatgacgaggctgttgacgatataagtgcggtattctttcagaacagatggctggtttattttaagggaagccgtttgacggaaccagacggggataaaaccatgctggggctggcctgggcggatacaatcacgggcccgtatcacagatatgaagggaatccggtcatccgtggtcatgcattttccatatggccgtataaggaggggctctgcctgctgtccggactcaagcacagggagggagagggaaggatatatggagataactggaatgatccggaagggatacagtatctctattacagtgaagacgggatccatttcgagccgtgtgcaccgtttccgaaccgggcctccggcatctttataccggaaggagaggaccaaaaggacattacgaaatactggggagtcagcgtggcaacggctgatgcacataagaagcggtacattgaacgtttcgactttataaagaaaaatccgcaaaccacttgacatttccccccgcaatggataaaatgaattcagttttatcagataaatgcagtgaaggtgtcagtagaaccttattttcttccagagagagggagtcaccggctgaaagcccccttaagttcagataagtgtttgaatttcccactgaagcagcatgacagaaaccgtcctatgaagcggcggcgggtaggtcatgacgttcatacacgttacgtatgccgagtgcctgcgcgttctgtgcgggaatcagggtggtaccgcgaacttcagcttcgtccctagccaggggcggagcttttttgtgtaataggaaagtgctcctattacataaaaaattctatcatgggaaagtactcctgtgatatcaaaaagccctccggcgtgggagctctttagttattacaaccaatgatattataaagaaggagagtatgatgaaagatcaattagacaaaatcagagaagatgcattgaagcagatcgaagcgtcggacgcgctggaaaagctgaatgagatcagggtcgcttatttgggaaaaaagggcgagctgaccagtgtgctgaagagtatgaaggacgttccgccggaggagaggccgaaggtaggacagatggtcaacgatgcccgcgccatcatcgaaaacaggctggaggaggccaaagcatctctggcaaagaaggcgagagaagagcagatgaagagagaagtgattgatgtgactcttcctgcaaagagaaacaatgtaggccacagccatccgaacaccatcgcgctggaagaggtagagcgcatctttgtcggcatgggctacgaagtggtggaaggtccggaagtggagtatgacttatataattttgaaaaactgaacattccgaagaaccatccggccagagacgagcaggataccttctatattaacgattccatcgtgttaagaagccagacatctccggtacaggtccgcaccatggagcaggggaagctgccgatccgtatgattgcgccgggacgcgtattccgctccgatgaggtggatgcgacccattccccatccttccatcagattgaaggcctggtcatcgacaagaacattacgtttgccgatttaaagggaacgctggcagaatttgcaaaggaactgttcggaccggagacgaaagtaaaattccgtccccatcatttcccgttcacagagcccagcgccgaagtggatgtcacctgctttaaatgcggcggcagcggctgccggttctgcaaaggctccggctggatcgagattttaggatgcggcatggttcatcccaatgttctgcgcatgagcggcattgatccggatgagtactcaggcttcgccttcggcgtcggcctcgagcgtattgcgcttttaaagtatgagatcgacgacatgagactgttatatgaaaatgatattcggttcttaagacagttctagggaaaggaaggaaaaaagagatgaatacaccattatcatggattaaagcatatgttccggacttagatgtcagcgaccaggaatatacagatgcgatgacattaagcggtacgaaagtagaaggcttcgaacgccttgacaggaatttagagaagatcgtagtcggccggatcgacaaaattgaacgtcacccggatgcggataagctgatcatctgccaggtgaatatcggcggagaaaccatacagattgtgacaggtgcgcccaatgtaaaggaaggcgataaggttccggttgttttagacggcggaaaggtagcgggaggccatgacggcggccctctgccggagaacggcgtggcgattaaaaagggcaggcttcgcggtatagagtcaaacggcatgctctgctccatcgaggaactgggttcctctaaagaaatgtatccggatgccccggagagcggtatctacattctgccggaagacgcagagacaggcgctgacgccatcgaggtgctgggccttcgcgacagcgtattcgagtatgagatcacctccaaccgcgtggactgctacagcgtaatcggtattgccagagaagcagcggctacctttgacaagccgtttcagcctcctgttgttacggctaccggaaatgatgaggatatcaacagctatttaaaagtatccgtggaggacagtcatctctgcccgcgttactgcgcgcgaatggtgaaaaatatcaaacttgctccgtcaccgtcatggatgcagcggcgcctggctgcatgtggaatccgcccgattaacaacatcgtggatattacaaactacgtaatggaagaatatggacagcccatgcatgcgtttgactatgaccttctgtcaggccatgaaatcattgtgaaatgtgcgaaggacggggatgtattccagacgctggacggtcaggagaggaaactggacagctccatcctgatgatcaacgacggagaaaaggaagtcggaatcgcgggcattatgggcggtgaaaactccaagatcaccgatgacgtgaaaaccatggtatttgaatccgcctgcttcgacggaacgaatatccgcctctctgcaaagaaggtgggactccgtaccgacgcttccggaaaatacgaaaagggccttgatcccaataacgcggaggcagccgtaaaccgtgcatgccagctgatcgaggagctgggcgccggagaggtagtcggcggcatgatcgacatctatccggaaaagagagtggaaaagagaattccgtttgagccggagaagatgaataagcttctgggaacggaggtctccgaagacaccatgctgggctactttaagaagctggatctgggttatgacgccgatgcgcgtgaaattattgtgccgaccttccgtcaggatttaaactgtatggcagatatggcagaagaggttgccagattctacggctatgacaagattccggtaacgcttccgtcaggagaagccacaaccggcaagctgtcgtacaagctgcgcgtggaagaggtggcgagagaggttgccgaattctgcggattctcccagggtatgacgtattcctttgagagccccagggtctttgacagactgaagcttccggctgacagcccgcttcgtaagacagtgggaatcttaaatccgctgggcgaggatttcagcatcatgagaacgtctccgctgcacggtatgttaagctccttgtcgacgaactataaccgaagaaataaaaatgtccgtttatacgaactggcgaatatctatcttcccaaatcccttccgctgacagagcttccggacgagcggatgcagtttacactgggaatgtacggcgacggtgatttctatgatatgaagggtgtgattgaggaattcttcgacaaagccggcatgcataagaaaccgcattataatccggatgataaaaagagttacctccatccgggcagacaggcagatatcgtttacgacggagttacggtggggtatttaggcgaggtccatccggacgtagcggataactacaaaatcggtgagagaacgtatgtggcggtaattgacatgccttctatgattccattcaccacgttcgaccgcaaatatacaggcatcgcgaagtacccggctgtatccagagatatcagcatggtagtacccaaggatgtactggtaggccagatcgaggatgtgattgagcagcgaggcggaaagcttcttgagagctaccagctgttcgacatctacgagggagctcagattcttgcgggatttaagtcggtggcgtattccattaccttccgcgctaaggatcacacgctggaggacaaggaagcaggagcggttatgaataagattctgaacggtctgcaggcacttggaattgaactgagagcataaaacgaaacagcatcgaaaactgacgccgtccggcgggagaatatcctctagccgggcggcgtttctttctgaaactacaattttgagctgtttcagagtcagttttacgcagcaggtataaagtgacggagttgtgttcatccttacagaaaatggattgtttttgtaaggaggaatgcagaatgacagaaggtcttgaaattatagaggtaaccgggaggcggctgtttgattcggaaggactgccggccgtggaggcggaagtagaactggaaaacggagcgagaggccgggctatggtggctctctgcgaaaacagcgggaacacggatcagatgatggaggtgctgtcagagtgcgtactgtttgaggatgcgtcggatcagagaggcgttgacaagattctggaagagaccgtctcttccgtcggcaccgcaaaatgcggcggctttttaaccgcggtttccatggcggtttcccgggcagccgctgcagggcttggtatgcctctttaccggtatttgggagggaccgcgcccggccgtctgccggttcccatgatgacgatgataagcggcggccgatacggaaaaaacaactctctcgacatggagtcctatatggtggttcctgtgggagcggcctcctttcgggaaggtgcagcgaggtgtatggaggtttatcaggcgctgaaacggctgcttacgatctccggacatcagaccggagtgggggaagacggcggcttcgtgccggatttgagaaattcggaggaggctctggagtacgtgatgaaagccatgactctgtgcggctgcgagccgggaaaagatatgtgtatggcaatcggagccggcgcgggagcactctatcacgagggaaccgggttctatcagtttaaaggggaaagcaggatgacaggcgttcccgtcgaacgggacagaaacgatatgatggcattctatatccgcctgatggacggatttccggtctgtgctgtcttcgacggccttgccgagtcggatgcagagggctggggattactgacgaagatccttggaaaccgcgctgtcttcatcggacagcaccaataccgggagcccggcggcataaatccgtatgaaagagactggaccggtctttcggactggaacggggtggaggaaaatgcggcaggtatttccctgtgcggagcaaagagtgtgaccgcagccatggagatggcggagctggcgaaaaaaaacgggcttaaacttgcggtttcccaggggtacggcgagacagaggatccctatgccgccgattttgctgcggccgtaaatgcagactggatcagggcgggggccccgtgccggtcggaacggacctcaaagtataatgagcttctgaggattgaagaatggatgagcggataccattccctccctgcttccatctgctgcgataaaatgtgaaaattcaaaaaatgcagttgtatttatggaaaaaatatgatatgattaccatgtttgactataggaggtggaaaagggacatgatcagaacgattttatcaatcatatttgttatcatatgtattgcattatctgcaattattttgctgcaggaagggaaaacacagggcttgggttccatcggcggtatggcggatacttactggggaagaaacaaaggccgttccatggaaggtaaactggagaaatttacaagatacggagcgattctgtttttcgttcttgcattagtattgaatctgaatatactgtaaagattaaacactcttgtggtcaggcggcaagggtgtttttcatatcatgggaaagtgcttctataatgaatgggaaatgcccttcggacgggattctttcctgcatctttcgggcataatgataaagcagagtaaaacgcagcgaaaaaacagaaaacgaggaaattatgacagaggaacaattgacacagagaaagagcatgatactgaagctggtggaagaaccggcctacgttccgatgaagctgaaggagatggcgattcttttggatgtgccgaaggggcagagagaagaactgaaggaagtgctggatgcactgctggcagagggaaagatcggtatctctaaaaaaggaaagtacggcaagccggatatcggcgccataaccggaatattcagcggccatccgaggggatttggttttgtgaccgtggaagggcgggaccaggatgtctttatacccgaggataagacggctgacgccatgaacggtgataccgtgcagattgccgtcgaggcagagggcgagggctcgaaacgggccgagggccgtgtcctgcgcgttctggagcatgcgaacaggacggtgatcggatattatcagaagaataagaattttggatttgtcattccggacaaccagaagatcggcaaagatatattcattccccaggggaaagacatgggggccatgaccggtcacaaggtggtggcggtgcttacggattttggcggaagccagaaaaagcccgagggtgtggtaacggagatcctgggacacgtaaacgatccgggaacggatatcatatccatcgtgaaagcgtacggtcttccggaggaatttcccgacgaggtgatgcagcaggtggagaaaatttccgacgacgtcaccgaccgcgagcgggaaggcagactggacttacgcggcttgcagacggtcaccatcgacggcgaggatgcgaaagacctggatgacgccatttccatatcgaaggagaacggtgtatatacattgggcgtccatattgcggatgtcagccattacgtgacggagaacagtgcgctggatgaggaagcgcttaagaggggaaccagcgtctatctggtagaccgggtgattcccatgcttccccataagctgtccaacggaatctgctccctgaaccagggggaggaccgtctggcgctcagctgcatcatggagatcgatgaggcgggcaatgtgaccggacaccggattgcagagacgcttatcaacgtggaccggcgtatgacctatacggcagtgaacgcagtcgtgacagatcgtgacgaggcagtgatggaggagtacagggaattcgttcccatgttccttcttatgaaggagctggctgatatcctgagagagaagagaaagagcaggggatcgatcgattttgacttcccggagacgaaggtggttctggataaaaacggaaaaccgctggagattatgccgtacgagcggaatgcggcgacgaagatcatcgaagatttcatgctgattgctaatgagaccgtggcggaggactatttctggcaggagcttccattcctgtacagaacccatgataatcctgatccggagaagatgaagagcctggctacgtttatcaataactttggctattccatccggttccataacggagaggtttatccgaaggaagtccagaagctgctggtgaaggcggaagacacaccggaggaggcgctgatcagccgcctggcgcttcgttccatgaagcaggctaagtatacggtggtgaacacggggcattttggactggcggcgaagtactatacccactttacctctcccatccggcggtatccggatttgcagattcaccggatcatcaaggagaatttaagaggcggactgagcgaaaagagaacggcccactacgataagattctgaccggcgtttcagtccagacctccgccatggagcggcgggcggatgaggcggaacgcgagactgtgaagatgaagaaatgtgagtatatggcgggccatatcggcgaggaatttgacggcgtcgtatcaggagtaacaaactgggggctctatgtggagcttccgaacacggtggaaggtctgatccgggtaggtgagttaaaggacgattattaccgttttgatgaagaacattatgaactggtcggcgagatgacgagaaaggtatacaaactcggacagccgatccgcgtcatggtcacgggaaccgataagctggccaggacgatcgactttattcccgcaagaacttttacagaggaataacaggaggaaaaaaggatggggaaagagagctttaagctggttgccaataacaagaaggcataccatgattactttatcgatgagaaatacgagaccggcattgaactggccggcacggaagtgaagtccatccggatgggcaaatgcagcattaaggaagcctttgtgagaatcgacaagggggaagtatgggtatacggcatgaatatcaatccgtacgagaagggcaatatcttcaataaagaccccttaagaccgaggaaactgctgatgcaccgggcggagatcagtaagctggattccaagatcgcggtgaagggctatacgattgtgcccctccaggtttattttaagggaagcctagtgaagctggagatcggtctggcacgaggtaagaagctctatgataagagggaagatatcgcgaaaaaggatcagaaacgggaactggaacgtgactttaagataagaaatctataatatgacgcagtctgcgtccctgggaagctatggcagtaagcgtggattcccgggggctggactgtgtttttttgtctttgggaatccgtgcccaaacatggaatgaggtctttcgcgaattacgtgtttgtggtatactgtaaaagacgaacatacaataagaggaaaactgagaggagaatcggttatggcgctttatgactattcaggtgctttgaaaaaaggaagaaaacagtatcaggtttccgtggcaaagggagagtatccttatcttcctgtgctggacgatatcctttcctacacggatatcatttcagaagtgaatctgggactgatggatgtcccgctggataagatcgttggaacaaaaacaaaaggcagaacgagtgcctttgccaataattttatgcctctgctggcagagaagtcagagtttggggcgaaatgggcgtatttatacgaccatcagatagaagaggggatccatgatcccatcgttgcgtatgaatttatgaatcaatattacgtgcaggagggcaataagcgtgtcagcgtgctcaaatatgtgggtgcattcagcatcacggcctcggtgacccgtctgatcccgaagagaacggatgatctcgacaatcgcctctattatgaattcctggagttttaccaggtgtcctttaactgtgatgtctggttcagccaggagggctgctacgaccgcctgttaaaggctatgggaaaggccccggaagaggtgtggagcgaggacgacaggatctatttcaaatccgcctacgaccagttttccaaggcgttccgcgcatttggagggagttcctatgagatgacgtgctctgacgccttccttgtctatgtcgaactgttcggctatgatgtggtgaagttaaagactgaaggggagatcacaaaggatctggcgaagattaaggatgaactcctgctggcatccagaggcagcaagattgccctggtagagcagccggaagaggtggaagagcaggataacggcccgttaaagatcattaactggctccgcccatcccagaacatcgaacctgagatgctgaagattgcatttatccatgcgaagaccgctgagacgtccagctggacctacggccatgagctgggacgcatgtatctggagcaggcctttgagggccggttaaagacggttgcgttcttcgaggccgacacggatgcagagattgcgaacgccatcgacctggcgatagcggccaggtgcaacatgatctttacgacggcctcccagatgatcggtttaagcgtcaaggctgccatcgagcatccagaggtgaagattttcaactgttccgtcaacatgtcgtattcatctgtctgcacctattatgccagaatgtatgagtcgaaattcctgatgggcgcgctggccgcttccatggcgcagtgtgataagctgggatatattgcggattatccgatctacggaaccatcgccaatatcaacgcatttgccctgggcgcgcgtatgatcaacccatacgtcaaggttcatttggagtgggcgagggtaaaaggcaggaatgcccgggaggaactggagaaggaaggaatcgcgtttatctccggagaagacatgatcacgccgaagaccgcgtcgagagagtacggtttatataaaatagagtctgacggagaattccggaatctggcgacgccgatctggcactggggaaaattctacgagagaatcgtgaatatcacctgccgcggcggctccgatgtgaaggagatgaagggaaagcaggccatcaactactggtggggaatgtcggcggatgtgatcgatgtcatctgttcccagaatctgcctcacggcaccaaccggctgattacgttcctgaagaattcgatccgaagcggaagcttccagccgtttgtaggaaccatctactcacaggatgggacgattcagtgtgaggaggaacagaggctttctccggaagagatcatcacgatgaactggctggctgacaacgtggtgggaaagcttcctgaatttgatgaactgacagaggaggcacagtcgctggtaaggcttcagggactgacgatatacgacaatgcggtgatggaggaataatggtttgaagattctggtactggctgatgaggagtcaaaatccctttacgagtacttctcacccgagaagatcaaaggggtggacttaattatttcatgcggggatttaaaggcttcctatctgacgttttttgccaccttctcccatgcgccgcttctgtatgtaaaaggcaatcacgacggacattacgaagaccggccgccggaaggctgcgtctgcatcgaggatgatatctttgtattccgcggcgtgcggattctgggcctgggaggttccatggagtatattccgggagccgataaccagtatacggagagagggatggagcggagaattaaaaagctctggtggaagttaaagaagaacaaagggtttgacattctggtgtctcacgcgcctgcatatcagattaacgatatgcaggatctgccccaccgggggtttgcgtgttttaaagacctgatggacaagtatatgcctaaatattttatccatggccatgtccacgccaactacggcggcggtttcaaacgcgaggatacatacggggaaaccagaattgtcaatgcatatgaatattatatctttgattatccggaaaacggagaacaaacgacatcataattccggaaaggggggatgatcccatggacgtgttttaccggcctgaactttctgttcagacgcttttgatggatgcaaataccgtacaggaaacagcagagaatctggctgattatatcaatcatctgatgagcgccgattcggtactcctggttcgtctggacaatcagatgcgttacaaggaatctggttcctggaaagccggaaatgatggggagaacggtgtggaggcagtcatgaggcagtggcttccgcggctggtggaaagctggaataagagagaaaagctgtcctgcggggaactgaaggacttttgccaggcactcacaccttacaccgtgccgggcggttatctgacgattctgccgatctgcaatcatatacggtttgtaggatttgcagtattcgggaaaagggccgaggagggcgactggacggataaggagctgcctgttctccggttcctgctgtcgattatcgcggtgacatttgcaaacaagaatctgtatgaagactatatgctgcagaactgggtatataataccatgatggggcgcatgcaggcgaacttatatgtgacggatattcacacggaccagattctgttcatgaataaaaccatgcaggaggcattcggccttgagaatccggtgggaaaggtctgctggcaggttctccagaagggaatcaaaggcagatgcccgggctgtcctgttacgaggcttacggagtcaggggaagagggcgtatacagacgttgggaagaatacaatactgtgacgggccgctactacgataattacgacagtctgatgaaatggacagacggctccaccgttcattttcagcattcgctggatattacggcttccaaaaaactgtcgaaggaggccagcacggatgagctgacgggacttctcaaccggagaggcgggaagaaccggctggcggagatgctgaatatggccagacatcaggaggaggttctgacggtctgcatgtacgatgtcaattccttaaaaaaggtcaatgatacattcggacaccgggagggggataaccttctgcgggtcattgccaacatggtaaagagcgttttgaccgaacgggattttgcatgccgtttaagcggagatgaatttctgattacgtttgcaggaaagacggagcaggaagcagatgaactgattaagctggtggaagagcggctgctggcagtgcgcagacaggacaggattccttacgaactgagcttctgcacgggaattttagaactgaagccggagcacaccatgagtgtgacggatattctgcgggaagtggacgagcgcatgtatgaccagaagcgccagtatcatatgcggcagggaaaagagtcggttctggcggcgtccgaagcccaatggcgccttttaaaaccggaggcgtttgactacgaccagcagtatctgtatgatgcgctggtagagagtacggatgattatctgtacgtatgcgatatggcgaccaataccttccggtacagcaggaagctggtggaagagtttgcttttccgggtgaggtgattcaaaatgccgcagatatctggcgctccattatccatccggcagactgggaacggttctgggaatcgaaccaggcggtcagcgacgggcggaccgtgagccatgaggtcgaatacagggcgagaaaccggaaggggcagtggataaagcttcactgccgcggtcacgtggctcagaactctgcgggagagccgcgggtatttgccggatttatagcgaatgaaggccagtggtttccggagtggaccgaatagaacgacaggagtaaggcgatggattacagaacgaagctgtgtttctgcagggatatctatgatcagagagcgagtgacagaacttttatggaggcagtccgcaggaatgtggactgccatctcttaaaatgcaaagattacaggcggattttagagagccggggattttcgcggagcgatggccaaagggttatgaacgccggggaggtgccctgcattccgactttgttttttaaatatcacgatctgtattctgtgccggaagcttcgatggtgataaaggccacctcctctggcaccgggggagtaaagagcaggattggatttgataaaaagagtcttttctttgccggagtcgctgcaggacgagtcattgcacgccatggactgttttccgtgcgtccggtgcactatgtgattctgggatttccgccaggaaaagaaaatcagacggcgatcagcaggacgcagcggctcagcacgatgtttgcgcctgcgctcagccggaagtatgcgctgcgaaaaggaaaacacggataccgtcctgattttaacggactgctggaggccctccggcgttacggaaggggaaatgccccggtccggatcattggttttcctgcatacctctatttccttttaaaggagatggagcgaaacagaatctttatccgtctgccaaagcattccatgattatggccggcggcggctggaagcagttttataaagagacggtggacaaacgggaattgtacaggcttggagagaggcatctcggtatcccggagagccatttccgggagtttttcggcgcggtggagcatccgggcgtatactgtgactgtccgaaccaccattttcatattcctgtgacgagccgcgttgtaatccgtgacgtggatacgctggagccggtcggatacggaacgaccggactggtgaacttaatcagtccgctggtggaaagtatgcctcttgtgagtatactgaccgatgatctgggcatcctgcaccgcggctgtgagtgcggctgcggaatcgaagcaccgtacctggagatcattggcaggaccggtgtccccgagatccggacgtgtgcggccggagcggaagaagtgttaaaggaggctggacggagtgcgttacgatgaactggaacaaaagacaacagccctgctggaacagccccctctttccagaactgtggttatcgaagcctgcagccgcttctcggagcttttaaatggcggcgcctatgatgagaagattcgggaatacggaatggagaagcttctgacgggagaaatgatatcaagggcagcctcgttactcagagcagatgcgttaaagaaacgggtggaaacagagctttccggttttcagaatcagtttctcatgcctctgggcgtccttatgcatgtgactgccggcaatatgaccggtatcggagcgtacagcgtgctggaggggctcctggccggcaatatcaatctgctgaagctctcgtctgaggacgacggcctctcggtattcctgctccgggaactgattcgtatcgaacctgtgctggcagactatatctacaccttccggataccctccggagacagggagcggattttgaagcttttaacgctttccgacggtgtatgcacgtggggcggcgacgatgctgtccggggaatccggagtctggcgcctgcggggacaaagctgatcgagtgggggcaccggatcagctttgcctgcgtcaccagggcgtgtacggaacgtgaggaagcgcttcaggcaatcgcagatcacatgatccggacaaatcagctgctgtgcagctcctgccaggggatctatgtggaggcggaaggaagggaggccgaggaattctgccgccgcttcctgaaactgctggaatattcctgtgagaaatatgggaataaagaagccggattccgtggtttaagtaccatccggatgtaccggaaggaactggagactgccatgacaggagagcacatgttccggggcgacggggtcagtgttaccctggcggaagatccgaagcttcagctgtcactgatgtatggaagctgctgggtgaagccggtgaaccgggagagactcgtggaaatcctgagaaaagacaggggaaagctccagaccgcgaggctggtctgcctggaggaagaagagcaggagatggtccggatactggtcagggcaggagtcaaccggattctgacaggacgggaaccggattcagaagtgtattttgacagccacgacggagagtatccgctgatccggtattccaggatcattgcggccgacatccggcgttaagacaaggaggataagatatgaatgaaacaattaataatctgatcgacagaagaagcgtccgtgcctacacggagaaggccatcccggaggaggcgatggaactgatcttaaaggctggaacgtatgctccttcaggcatgggaagacagccggttgtctttgtggcagtggagaagaaggaggtgcgtgacaggctgtccaggatgaatgccgcgatcatgggaaccgattccgatccgttttacggtgctccggccgtaatcgtggttctggcggaccgaagtgtccccacctgtctgtatgacggatcactggctatggggaacctgatgacggcagcacattcgctgggaatcgattcctgctggattcaccgggcaaaggaggaatttgacagcccggagggaaaagcactcctggaggaatgggggattcacggagattacgagggaatcggccactgtatacttggatacaggagctgtgaatatcccgaggcaaagcccagaaaagaaggaactgtgatacgaatctaaaaataatttaggagatctaaaatatttttgtgcaatgtgatgattttttatatggatgttgggctacaatgtccattgaagtgtgcattttttcatgttatgataaaataacaaaaaaatttagaagataaaaataatttttaggagaaatgcgcgcatggatcatcacgtgataatgaaaaagtaccggatgtttttgtatggaatgattgtggccgctttagggatcagcatgattacaaaggcggagcttgggacgtctccgatcacgagtccgtcttatgtcctgacgtttatctttccttacagcctgggtgcttttgtactggcggtgaacagtacgctgtttctgcttgaatgtctcgttctgggacgcggctttaaaaagattcagctgctccagcttccggcaacactgatcttttccgcctgcattgacggctggatgtgggttttgtcattctggacaccggtgttctatctgcagaaggtccttttgcttctcgccggctgtgcagcgctggggctgggcgtggctttggaagtggtgccggatgtgctgattcttccgggagaggggcttgtccgcgcgatatcacgcaggaaaggctgggatttcggtcttgtaaagacgtgctttgatctcagtcttgtgcttgcagccattctcctttcagttttctgtctgggtcatgtggaaggaatccgggaaggcactgtggcggctgcgtttctggtaggcggtatttccaaattctttatccgccatatcacggaatttgacagaaatcacagagcactgttcgtgcgtgaggaggaggaaagacttctggtgacggaagaataggggagggcggaaactcttatattgtgacagctgtcatagtactgccggtttggcgatgatataatgatcctatcaaatcaatggaacgtttgaaaacagtcaaaagttttaagaaaggacaggatcatatggaacagaaccgtgtgctggatgtgcttacatccaaagaattaacgtatgaacagaaagtattttcactggctagggaagcggaagacagcctcgaagtactggacattccgccgaagaccagagcgtattttgagacaggagcattaaacgatttatttgagggacacgcaccctatcgtccaaggtatatcatgccggactataagaagtttgtaagacagggaagcaagtttttgcggatcgagcctccgaagacgctggatgagctccttacaggcctggaaattctttatcatcacgtaccttccatcacaggatttcccgtgtatctgggagaactggacactatgatcgaaccgtttactacggggctggcagatgatgaagtgaaggaaaaaataaggctgtttttgatctatctggacaggacgattacagacagcttctgccatggcaatctgggggcgaagccgacgagaacgggacggataatcctggaactggaaaaggaacttcagaatgctgttcctaatttaaccttgaaatacgatccggatgttactccggatgagtatgcagagctggccgtttccacatccctgtactgtgccaatccggcgatctgtaacgatgcggataaccgaaccacctatccctgtgaatacggaatctccagctgctacaatatcctgccggtgggaggcggagcctatacgctgtcgaggattacgctgactgagctggtaaagagcgcaaaatccacagagcactttttaaaagagcttcttcctgactgtttaaatgcagtgggtaattatatgaatgagcgggtgaagtttcttgtggagcgctccggcttctttgagtcatcttttctggtgcgggagggactgattgaacgggagaagttcgtgggaatgttcggcgtgacagggctggcggaatgcgtcaacgctctgatggccgatacggggaaacggtacggacacagtgctgagtcggatgatctgggagtgcagatcatggagatcatacagaaattcgtggcagattttccggctgtttattcagagattggccggggacattacctgcttcatgctcaggtaggattagacagtgacaaggggatcacctccggcgtgcgcattccggtgggagatgagccggagaacctgctggaccatctgcgtcacagcgcaagattccatgaatactttccgacgggagtgggtgatatcttcccatttgccgtcacggccaggaataatcctggggcattagtggatattgtgaagggatcctttcaattgggagttaaatatatgagcttttatgcgtcagacagtgatctggtccggattaccggcttccttgttaagcgcagtgagatggaaaaatacaggaatcacgatgtagttcttcagaatacaaccgtgcttggcagtaagaattacgacaccaatcatttagagctgcgaaaggagcgtatggcgtgaaagctccggtcaataagatcatcccggtcagcgtggtggacggcccgggaaaccggactgccgtgtttcttcagggctgtaacatttcctgtgcatactgccataacccggaaacacaaaacctgtgcacaggctgcggagtctgcgtggacggctgccccgcaggagcgctgaagctgaacggtgaaactgtggtgtgggatgaggacaagtgtatctcctgcgatcgctgcatagccgtatgtccgtcttttgcctctcctaaagtcagggaaatgagtgcggaggaagtgttttgtaaggtgtccctcaatatgccgtttatccgcggaattacggtatccggtggggaatgctgcctttatccggagttcttgaaagaactgtttggcctttgcagaaaagccggactctcctgtttgatcgacagcaacgggatggtggatttttcctcctgtccggaactgctggatctctgcgagggtgtgatgctggatgtgaaaagctgggatccatgtgtttaccggagactgacgggagcggataatgccgttgtacgaaagaatctggagtttctctggagaaaacgtaaactggaagagatacgcattgtctgtcttcctggagaaagtgattatgaagacgtactgctagggattgcgggtctcctgggaagcccgattacggtcagagtcaagctgattaagttccgtccttttggtgtcagaggcaggctgagcggggcatcacggccggaagacgggctgatgcgggaactggcttcatgggctggggaactgggatatacgaacatcgtgcttacatagaaaaagagcaaacagaaaaaagatagacagagaaaaagaacttttcatcgctttagcagcgcgaaaaagttctttttctctgtctatctttttggatataaagttagtacaggcaatatatacaaaatgcacaaaaattaacatgaaattaatacaaaatataaaaaaacttcaggtgtgacatgtgtcatagcagtaaaattgatggacgtgtatgataaagctacagaaattaagaaaaaaataatccgttcgttgtgatataataatgcagacccaaaagtacagaaaggaaaccagacatatgaagacagaaaaaacatctggtcagctgagagagctttttcgagttgcatacgtagaaaatcaggaccagacaatcaaaatgcacgacctggaccgttttttgaatccatgtattacgatgcggatggtaaagaagggagaggatattgtccggccgacggataagcttcagtcaattattttggtggtgaagggaggggcccatttcacacgggtatccacagatggaaacactaatatgcttgcggcggttaacgctccgttttttatcggaatcacgcagctggtgtcaaacgacaaggagtattattcccagatcattgcagcaaaaaactgcctgcttctttacattgactgcagctactttttaaagggaatccgggaggacggggaggcagccctgattgttattcgggatcttgcgaaggtggtagagagaaaccatacgagaatggaccgaatggtctttttaaaagcctccaataatttgatggcatacatcgaaagcaagtggaatgaaagcgagatctgccgaagagaccggcagctcaccatccgggaacgccacggtgtgattgccgccgatctcagtgtaagtgtcaggacactgtaccgatctatcaacagtttaaaagatgagggactactaacggtgcaaaagggcggtgccctgatggtaaatgaagcgcagatggaagagatgaagcgcagacttgagaagcttggaaaaatgtaatttaacatttctataagaggagaaggagataagattatgaaacattacaaaaggttactcggggtgttacttgcggtaggtatgggactgtctcttctgactggatgtcagagcagccagccggcaggcggaagtacggcggcagacaaggcggaaacagataaagcgggtgaagatgcgtccggagacggagcacaggcaaagaaatcagatctggttgtgggaatgatcgccaatgcgtttggaacacagagctacaacgatgatgttctcgccggaatggagctggcggagaaggagctgggagtgaaaggtattccgctggaggtgccggagatttccgactctgcaaacagtctgcgtactctgatcagccagggcgccaatttcatcatggtcccgtcttccgaatataaggatggaatgctggaagtggcggcggagaatcccgaagtcaaattcctgtatctggcagaagctattgatggcggcggaaacattatgtcagtcgcttatcgtgaaaatgaagcggcattcctgggcggggcgctggcggggctgatgacgaagactgataacgtcggcgctgttatggcagtaggagagaccctgcagtaccgttaccagttcggcttcaccgcaggtgtcaaggctgtgaatcctgactgtgaggttcagtccgcatttaccaacagttacactgatgtgggacagggcagtgaggtcgcgaagattatgtacaacaaaggagcggatattattgggacatactccggcgcatgtaatctgggagttttcaatgcggcgaaggatgcaggagaaggaacgtactgtttaggcgctgccaacggacagtttgacaagatgccggataagattcttgcttccgtagtaaaaccggccgaccaggctatcttatcgattctaaaggaataccaggagaccggcgttttcgatacgagcgaaccgatgtcgctgggcttaaaggaaggcggcgtaaaactgttatttacaaacaacgaagagctgttgaagctgatccccgaagatgtgatgaacacaattgatgatttggctgcaaaggtggaatcaggagaaatcaaggttccttccgacgaagaagaattcaacacttttacctaccggtatgcaaaataaccgtgtatggaagatcagagaacggaggtgccttaattggggagcatcattgaactgaaggggattacaaaacggttcccgggaatcattgccaatgaccatatttccatcagttttgaagagggagagatccatacgctggctggggaaaacggtgcgggaaaatctacgctgatgaacatcttatacgggctgtatcagcccgacgaaggggaactgctgatccgcggagaaccagttaaattcagcaattccaaggattccatcagacacaggatcggcatggttcaccagcatttcatgctgattccgaaactgacggtgacagagaatattatcgtcggacaggagatagggactgccataaaagtggaccgtaaacgggctgctgaaacaatcggcgcgctgtctgagcagtacggactgaagatcgatcccaacaaaaaggtggcggacttatccgtgacagagcagcagcgtgtggaaattttaaaggtgctataccgggaagcggaaattctcattttcgatgaaccgacggctgtactaacaccgcaggagatcgatgaattctgtgatattctgctgaaattgaaggagaaaggaaagaccatcatctttatcagccacaaactggcagaggtgatgaagatttccgaccggatcaccgtgatccgtctgggaaaagtcgtaggaaccgtggaaaagaaggagactgactcgtctgaactgaccagaatgatggtggggcgtgatgtaaacctcggaaggcgttcccgccggaagtttgagaaggcggaaaacatactggaggtcagagatgtcagctatacggtcgataaaacggttaaaaagctgaatcacatcaatctggaactgagaaaaggtgaggtccttggaattgcaggcgtagacggcaatggccaggaggaactggtaaatgtcatatgcgggaaactgatgccggacagcggcagtattgtgatgaatggtaatgacatcacgaaggataaaatccgtgaccgaaaggatcatggactggggttgattccggaagacaggcatagggacggtttggtcctggaatacagcatagccaataatctgattctgggtctgcagtaccacgagacattcgcaaaaaatggagtctggctgaatttcaagaagatccatgatacggcagaggaattgagagagcagtttgatatccgatgtgcaggcgtcgatgtgggcgccggaacgctgtcaggaggaaatcagcagaagatcataattgcgagagaggcatccagggatccggaggtgctgattgcagtacagcctacccgcggtttggatgtgggagctatggaattcgtccagaaaaccctgttggaacagagggacaagggaaaaggcgtgctccttttttcactggagctggacgagattctatcggtcagtgacaggattgcggttatcttcaaaggggagattattgacgttgtagatgcacagagtgtgacacgtcaggaactggggatgatgatgctcggatccgtaagaggaaaaggagggaaagaagttgggacagcaggttaaaacaggaataaagatgccgtcaaagtttcgggaggtaggccttaatttcctgatctccttaattgcgctggttctggcaattataacgggcggaattattatatggctgttcggcaacaatccgttcgaggcgtataaggcattgatacagggcgctttcggaacaccgatggcattgactcaatccctgacaaaatcggttccgctgatgctgacaggacttgcagtggcgctggcctataaatgcacggtatttaatattggcgccgaggggcagctgcttgtgggcgcaattgcagcgggtatcgcgggaaccctgttcccgatgccgggaatcttaaatattcccttcgttctgatcgtatccatgctggccggcatggtttgggcgttttttccggcccttttaaagcagaaggcaaatgttaatgttgtaatcagtactattatgtttaactatgtaggccagtatctggtgcagtacttaatcctgggaccgtttaaggcggagggcgctgcgtcggccacgagaccgattcaggccacagccatgcttccaaagctgctgccgtcgccctacgtgctgaatctgggaattgtgattgccctgacagcagcagtggtcgtctacttccttttaaaccgtacctcgctgggatacgaaatgtgtgcagtgggattaaataaaaatgcatctctcacgaatggcatcaacgtggaacgcaacatgttcctggccctgctgatgagcggcgcgttagccggtcttgccggcgggatcgaagtgacaggaactatgggaaaggttatcaacggtttctccgcaaactatggattcagcggaatcccggttgccctaatggcacgcaacaatccgtttgcgatcattctcacggcacttttaatgggaagcatgcgcagcggatctctgatgatgcagtccagcgtaggcgtttccaaaaacatggtggatatcatacagggactcgttatcgtattcctgtgtgcggaaaatgtgatacgttattacataaagaaagggcggggaggaaaataatatgctgaatttcttaatttttatgctggcttccacactgcgcatgggaactccgattgcacttaccgccctgggcgggctcacatcagagcgctccggtgtggtcaatatcggtctggaaggaatcatgctggccagcgcctttggtgcggtgctgggaagctatctgacgggaaatccgtggatcggcgtgttgacggcaatgtttgtcggtgttttaatctcggcgatacactcggtgatctccattacctggggaggcaaccagtctgtcagttccatggcgctggtgcttctggcaaccggattttcaggagtgggactgaaagcggtctttggacagcagggcagctccccgcaggtaccgagcctggagcatacgccgatgctttcatcgatcccggtggtgggcggatttttatctgacttatccccctttgtgtatattgcgtttctggcgttgattgtgattcactgtatgtttaagtatactccccttggactgcggattatcactgtgggtgagaatccgaaggcggctgagacggccggtttatccgttcacaaaatcaggtatttttccgtgatcctgtccggtgtgctgggcggactgggaggtgccttcctctccctcggtcagatgaacttattccaggaggggatggtggccggacgcggttatctggctctgggagctgttactatgggacgctggacaccgattggtgcgtttgcctcgtccatgttctttgggctgttcagcgcagtccagctctacgtacagacaattccgggaaatcctgtacccagtgaatttattcagatgattccgtatcttgccagtcttttagtccttgccgtcagcttgaaaaagaacagcagtgcggtgggaatagccgccagcggcaagccatacacgaagtttgtccagcagcggtagctgcctggcagcccgcggaagcaaggcgcgggctgccgaatacggcgcggtcatcagacaaacgctgaccgcgtatttttttaacccaaattcaagaaaattgatcaaaaagacaaggagaatatgttaaaatgtcacaaaaacccaatatcatatttatacagaatgaccatcaggcatattaccattgggagtgggaaaacggtcctgtaccgatgcggcccaacttcatgaaactggcttccgaaggcgcctgtttcacacattcctactgtgcaacaccgctctgcggcccaacgaggcgtaccatgctgaccggtctgtttgcccatacccacaagcagtatcacaactatacggacccgccatacgatcacgaggtatatctcgacactctggcggaagcgggatacgacaactattatttcggaaaatggcatgcaggtcccggcgcggctaatgaacatcactgcagtggattctccagaaccgactacagcaatccctatatccagccagagtataaggagtatttaaaacggtataatctcccccaggcactccatcatattgaccgctacttcgatattcctgagatcagcagccgcggcgactgggcggaatgcgctgacaatgtggattaccagtgcaaggcaaactggtgtggtgaacatgcggtaggaagcactcttacacctaaggaaactcacgagtccttcttcctggctacgctggcctgcgagcagttggaaaagctggcgaaatcgaagagcgatcagccgttttccttaagagtggatttctggggacctcatcagcctcattttccgacacaggaattcctcgatttgtatccgaaggaggacttcgtgctgccggagtacggcagctacaggaaccgcctccaggggaagccgggtgcctattaccgggagagaagttcaccattcgggaaagacgatcagctaattataccgagtactgtaaattgggaggagtggacagaaattatccgtcatgcgtttgcccacatcaccatgctggatgctgcaggcggaatgatcgtggacaagttaaaggagctgggactggataaaaatacaatgatcatttggaccacagatcacggcgacgctctggccagccagggcggccattttgacaagggctcctatatgtctgaggaagtcatgaggattccctgtgcggttaaatgggaaggcgtaattccggccggacagattcgggatgagctgatcagtacgatcgattatccggttacgattctcgatgctgcaggaactgcttttacaaagaacaaggtccacggcagaagcctattgccgctgcttaccggaaagacggatcagtgggacgatgacctgatggcagagaccttcggccacggatacggggaggatatcaacagcagaatgctggttcacggcgattacaagctcattgccaataaggaaagtattgcggaactctacaatctgaggacagatccctttgaactacataatctgtatgaagatccggcttttgccgatgtgagggccgacttagaaaacaggcttcgcatctggcagaaacggaccgatgatccggtggaggtactgtagaaatggataaaaaaattacgcagatgctgattgaagaggcggcagaggcccgaaaacaatccttctccccattttccggattcgccgtgggagcggcgcttatgacggcggagggagcggtctaccgcggctgcaacatcgagtgcagcggactgacggccagcaactgtgcggagcgcaccgcgttttttaaagcggtcagcgagggagaacgaaattttaaggcgatcgccatcgtgggcggtcccagtgacagggacgtggaaagcctgtgctatccgtgcggtgtctgccgccaggttatggcacaattctgtgatctggatgcattccggattatcgttgcggcagaccgttcccattgggaggagtgcacattaagggaactccttccccgggcgttccataggcactgtacggcggaagggagcgaagaattatgagaatgtatgatgtaattatgaagaaacgggatggaggagtcctgaccgacgaggagatcgggtattttgtagatggatatacaaagggggaaataccggattatcaggcctctgccctgttgatggccatatttttccagggaatgaacgagcatgagaccgcttatttgacaggctgtatggcggcctccggcgacgagattgatctctcctcgattcctggaatcaaggtggataaacactctaccggcggtgtgggtgataagactaccatggtgatcgggcctgtggctgccgcctgcggtgttccggtggcgaagctttccggcagaggactgggacacacaggcggaaccctggacaagctggaggcaattcctggtctgacaacgtctttggataccgctaaattctttgacatggtgaaagaaatcggaattgctgtggcaggacagacggggaatttagcgccagcggataagaagctgtatgcgctcagggatgtaacggctacggtggataatatttccctgattgcagcaagtattatgtccaaaaaaatagcctccggttccgaccgtattcttctggatgtgaagacgggaagcggcgcgtttatgaagacgctggatgattccatcgcattggcaaaggagatggtgaatatcggcacgaatgtgggaagagaagttgtcgccctggttactgatatggaccggcctctgggcagaaatatcggaaatgctctggaggttatggaggcggcggccacactgaagggccggggcccggaagactttacacagatctgtattgcactgtcatccaatatgttgtatctcgccgaaaagggcactatggaagagtgcaccgccatggcaaaagaagcaattaagtctggcagggcattcgagaagttctgtcagatggcggaggcccagggcggagatgcgtcctacataagaagaccggagaaattcaccatatctccggtagaatacgagctgaaggcggaaaagaccggttatattactgcaatggatacagaaaagatcggaatggccgccgtggaactgggggctggcagaagaaagaaggaagatcccatcgattacggcgcaggcatcattctgaatgcgaagatcggtgaccgtgtggaaaacggccagacagtcgctgtgctgtatacttcggcggttcctcttttatcaggtgctgttgaattattaaaagaggcggtcgtgatcggaaaagagcagccggaagaggaaaaactgatctgtgcgagagttacaaaagacggtgtggaacggtattagagagaaaggatagaatgattatgacatattctgagatgcttcatttagtggaccatactctgttaaaggcctgtgcctcatgggaggagatttgcagactgtgtgatgaggcggtcgaatatcagacggcctccgtctgtgtgccgccctgttatattaagagaatccgtgagacgtatccggatcttacgatctgtacagtagtcggttttccgcttggatacagtgtgacagaggcaaaagtttgtgaagtgagagaggcgctggcggacggagcggatgaaattgatatggtgattaacttaaccgatgtaaagaacggtgaatttcagaaggttgaggatgagatcagaaccttaaagaaggctgcaggtgaccgcgttttaaaggttatcatcgagacgtgttatctcacaggggaagaaaaggtagccatgtgccatgccgtgactaacgcgggcgcagattttatcaaaacctccaccgggttcggaaccgcaggcgcccaactctccgatatcgaactgtttaagtccaatattggggagaatgtcaggatcaaggccgcaggcggcgtcagaacgctggaagatttaaaaaattatgtagaagcaggatgcagccgtgtgggcgccagcagtgtggtaaaacaggtggcagagcttcagaaataaagagcagatcgagtgctgctgcaagaaaatccggatccggagaatgcgcctttatttgacgcaaacgaaagatccggattttcatgtgcctcgtaatagtcccgctgcaagaaaaaatgaatcaggcccgggaagtgatttgaagtgtgccgggacaaaataccacccgaatcatgaagtataacctgaatttataatacacattacttttatgtagttgacaaatagaagcaaggttgttatcattaaaattactatacaaaaaggcggggatatgaatggaaagaatcgtattatcgttgctggttgacaatacttccggtgttttaagccgtgtggcagggctgttcagccgccgtggctacaacattgagagccttaccgtgggtgtcaccgcggatgagagatattccaggatgacagtggtttccatcggagaccaggaaattctggaccagatcgagaagcagcttcgcaagctggaggatgtgcgcgacattaaggaactgaagccggggcattccgtatacagggagctgatcttagtcaaggttcgggccaatgccagtgaacggcaggcggtcagtgccattgcggatatattccgcgctactattgtcgatgtcggcaaagattctctgacagtcatgctgacaggcgaccagtcgaagctggatgcgcttatcaatcttctggaagactatgagattctggaactggcaagaacaggccttacgggactttccagaggttccgacgacgtccgttacttaccgtagttttatgaagttagctagaggtgttgccaaaggcggacagagagtcgtcggcacagttcctttaacaataataatatgaatacatatatgaggaggaaataaaaagatggcaaagatttattatcaggaagactgtaacttatccttattagaaggaaagaccattgcagtcatcggatacggcagccagggacatgcacatgcattaaacttaaaggaatccggctgtaacgtaattgtaggactttatgagggcagtaagtcatgggccaaggcagaggcacagggcttaaccgtttatacagcagcagaggcggcaaagaaggcagatatcattatgatcttaatcaacgatgagaagcaggccgccatgtacaaggaatctgtagaaccgaatctggaagagggcaacatgctgatgtttgcacacggcttcgcgattcattttggacagatcgtacctccgaagaatgtagacgttaccatgatcgcaccgaaggcaccgggccacactgtgagaaatgagtatgtggttggcagaggaacaccgtgtctcgtagcggttcatcaggattacacaggcaaggcaaaagatatggcactggcttacgcgctggcattaggcggagcaagagcaggcgtcttagagaccacctttaaggtagagacagagacagaccttttcggcgagcaggctgtattatgcggcggtgtatgcgcactgatgaaggccggtttcgagactctggtagaggccggatatgcacctgagaacgcttatttcgaatgtatccatgagatgaagctgatcgtagacttaatcttcgagagtggatttgccggcatgagatattccatctccaatacagctgagtacggcgattacatcaccggaccgaagatcgtaacagacgagaccaagaaggctatgaagaaggttctgacagatattcaggacggtacctttgcaaaggactggctgcttgagaatcaggtgggctgttctcacttcaacgcgatgagaagaaaagaagcagagcatccggctgagaaggttggggcagagctgagaaagctttacagctggaatgacggcggcaagctgatcgacaactaatcagaatacagagaatattttctcctcccaggggaataaacgacagggagacgggagatggagggttgccgccatctcccgtctctatttatgctataggtaccaaaaagatactaatgggaatttcctgaggacaaagcagtcgatgaagcagggaaaggaaaatgctatggaaaagatattgccggcatgtccggttgagacgacgctgatgctgatcagcgacagatggaaagtattgattatccgggatctgatggatggaacgaagcgttttggagaactgaagaagtccatcggttctatttcacagaaggtgctgacttccaatctgcgggagatggaggcagacgggctggtgaacagaaaggtctatgcggaagtgcctcccagagtggagtacacacttacggatacaggatacagcttgaagccgattctggatgcaatggtcgaatggggactggaatataagagaaagcagaactgaacaggatgccggatacaggaggcatgagaccagtacggaagaaagaaacagacaaacgggaccgcccgggaaagcagatcactgccgtctcgtgcggtccccaattttgtagtgttatcttattcgccgcgtttatgaaatcggaaagctgccgcagaaggagagaaagtcttccagcgctctggaggttcctccggggttataggcaaaaccgatggtgcgttttttgatcggccatttcatgggaatcgtaaccagcatctgcttatccagttcctcctgaacgaattcccggatcacacagccgattccaagaccgattttggcgaactcgatgaggatatccatggtgtttacctccagtacctggctggggacgatctgatgctcactcagatactcgtcgatgtactttctcgtcatgttgttccggtccagaagcaggatattgccggtctggaagatatctgtattccggccctcacggagatataagttgtccagatacggtttggtagagacaaagatatcctgaatatccattaccggaacgaagatcagcggtttcctgctggacggttcggcgatcagtcccagatcaatgtgctgctgttccagcatggcgatggtgtgtgtggtggactggctttcaatggtgatcttcacatgcggatacttttctatgaacccctttaagtaaggaagcaggatatatttgcagagcgtattgctcacgccgatgcggagatggccgatattaaaatccttgatccgcttcagctcattctccccgcggctcagtgcctcgaaggcggattccgtgtgatgaaagagcagttcgccctcgctggtcagctgaacccctctggaattccgggtaaataaggagacgcctaaactgtcctccagtttgctgatggatttactgatggcgggctgactgatgtagagctccttggcggccttggagatattcccggcctttgccacttcgtagaaaatcttatattgcgaaaggttttgttccatgtatgcctcttttcttgatataactgactattatagtaagtattcatattatgtatttctattatatcaataagtatgttagaatgtaaagcagaaaatgagaacaggttttgaaggaggatatagattatgggaatgactatgacccagaaaattttagcggctcatgccggactttcggaagtgaaagccggacagttaattgaggcggacttggatctcgtattggggaatgatatcacctcgccggtggctatcaatgagatgaaaaaattcgacacacagacagttttcgacaaggacaagattgctctcgtcatggaccattttatcccgaacaaggatatcaaatctgcggaaaactgcaagtgctgccgtgattttgcatgcagacatgagatcagcaactactttgatgtggggcagatgggaattgaacacgcactgcttccggaaaaagggcttgtggtggcaggcgacgcagtgatcggtgccgactcccatacgtgtacatacggcgccctcggtgcattttccaccggtgtgggaagtacggacatggcggccggtatggtgacggggaaagcctggtttaaagtaccgtctgcactgaagtttgaactggtaggaaaaccgaacggctgggtcagcggaaaagacgttattttacatattatcggcatgattggcgtcgatggcgccctctataaatccatggagttcaccggcgacgggattaagaatttgaccatggacgaccgttttaccatctgtaacatggccatcgaggcaggcggaaagaacggaattttccctgtggatgatctggcggttcagtacatgaaggaccattccaagcgggatttcaccgtctatgaggcggatcctgatgcagagtatgacgaggtctataccattgatttatcggaactgaaaccgacggtggcattcccgcatcttccggagaatacgaagaccatcggctctttcggggatatccctgtggatcagtccgtgatcggctcctgtaccaacggccggatcgatgatatgagaatcgccgccagggtcatgaagggcagaaaagtggcgaagaacgtccgctgtatcgtaataccggcgacgcaggagatctatctgcaggccatgagagaagggcttctggagatatttatcgaggcgggagcgatcgtgagcacgccgacctgcggaccgtgtctgggcggttacatgggaattctggcagcaggagaacgctgtatctctacgacgaacaggaattttgtaggccgtatggggcatgtagattctgaggtgtatctggcaagtcctgccattgcggcagccagcgccatcacgggaaagatttcagcgccggaagaactcggcttatagatagaagagataaggaggacagattcatgaaagcgacaggttccgtttttaagtatggggacaatgtggatacggatgtcatcattccggccagatatttaaacatcacggatggatatgagcttgccaggcactgcatggaagacatcgacaaagactttgtgaaaaatgtaaaaaaaggcgatattatcgtagcaaataagaattttggctgcggctcttccagagagcatgcgccgctggtaatcaagtgtgcgggggtcagctgtgtcatagcggagacctttgcaaggattttctaccgcaacgccatcaatatcggtctgccgatcatcgaatgcccggaggctgctaaggccatctccgccggtgacgaggtggaagtcgattttgacagcggcatcattacgaataagacgacgggagagtcatatgaaggccaggcgttcccgccgtttatgcagaagattatttctgcagggggattgattccatatataaatcagaagtagggtaccgtcctgaaaacgggaggaggagtccgatagaccagagacagcatgctggcatatccgggctcctctgtgatttttactgatgacaggcagtgtgatatgatttatattatatagaagaaacacatcaaaaactgtcgaaagggaggaagagccgtatgacgattcaatttgccgcggaggaggacacggggctgatcctgcgatttataaaggaacttgccgattatgagggaatgctttccgaggtggaggcgacggaaccgctgctgcgggaatggatttttgagaagaaaaaggctgaggtgctgattggactggagggtggagaaccggtgggatttgccctgtttttccataacttttccacatttctgggcagagccggaatttacttagaggacctttacgtcagaccggaataccgcggaagaggctgcggtaccgcattcttgaagcgcctggcaaagattgcagtggaacggggctgcgggcgtctggagtggtggtgtcttgactggaataagccgagtattgagttctaccgggcgatgggagctgttcccatggatgactggacggtataccggatcgccggagaccagcttaagatgctttcggaacgggatgaatcaccggggtatgggaagtagataatcagaaaggagtttatcagatggtaaagacaaatgccatgcgtatgctggacaaggcaaaaattgaatacagaacaaaggaatacgaggtggatgagagcgacttatcgggaagccatgctgcggacatgatgggagtggatcacggaagcgtgtttaagactctggtgctgaaaggggagaagacggggtacttagtctgctgcattcctgtggatgcggaactggatctgaagaaaacggccagggctgcaggcgataagaaggtggaaatgatccccatgaaggatcttctggccgttacggggtacatcagagggggatgttctcccatcgggatgaagaagcaattccccacttttgtcgaagaaagtgctgttttgtatgatgagatcgccataagcgccggattaagaggccagcagatcctgatcgccccacaaacactggtgactttcatccgggggaattttgcttctttggcctttgaatagtttacataaaacaaaaacgcaaaaaagtacaaaaattgcagctttaaataagtaacagaaatgtaacatatttgtaaagaataaataacaaatatagataaataatgaggcgaaaatggaaaataaaatgtgataaatatacaaaaaatacaaaaagtcagaaaagcggcaaaggaaaatatcacaaagatgttaaataagtattgactttattgacaagactcctctataatacgctcgtcacccggaaacggctgcaaaagtctgcggcttagatgtaagagagaatagaaagaggagtatgtatgctgacattgcactcaattcttcagcatatctgtcagttctttcggggactggcggtgaaggccacaaaaaggatgtatcgatcgtcggctgtctttatggcaggcgcggctgtgatcaccgttgtggcatttacctcgaccggttttggcagcggagggaagagcgccctgacggcgtttgcggaaactccgggtcaggagacggcggcagaagaggaagatgcagaagaagaggaacctgttacggaagcaaaagtacaagtccaacttaccgaaataaaaaagcagggacaactgttagccggtaatctattggaaaaggaagtacagcagaaacaggaaatccaacaggattcaaaagaagagctcgagcgtatcaatgaacagattgtcatggacgctaaaataaaggcactggaggcggaagaaaatgcccgccagaaagctttggaagaagaaagacgcatagaggaagagaagaaggcagcaagccggaaggcgatctcagacgatgattatcaggtcctgctgcggatcgttcaggcagaggccggagtttgtgacgagaagggaaagattctcgtggctaatgtggtattaaaccgtgttaaaagccaggaatttccggactcggtaagaagcgttgtctatgagccctctcagttttcaccggtatcagacggttccattaattccgtgaaggtgacggaagagacgaaggaatgcgtaaaccgggcgttggaaggggaagactattccgatggtgcgttgtactttatgaaccggagaggttccagaagcagagccgtgagctggtttgattcccatttaacgtatctgttccgccatcaaaatcatgagttttttaaataaaaacattgtagaatattctgctttaggtgtatactataactggacggcagcagaaagagaacactgccggaagtaagaaattatatacataaaggagagcaggactatgatttttgactcagcgaagaatcttgatttttacagagggcttggaattgaaggcagatacggcaaagcagttgatttccttcagaataccgacttggaaaatctggaaccgggaaagtacgaaattgacggcaagaatgtctacgccaatgtaaccgaatatactacgattccgtgggaagaggcaaagtacgaatcacatcgtgactacacggatatccagtacatgatcaggggcacagagaccatgacctatgcaccggtggacgcgctgaatgtgaaagtaccgtataacgaagaaaaagactgcgtattatacgacaatgcaaatcctggattgaaggtagttgtcggagcaggtgaatatatgatctttcagccgtgggatggccataagccgaaggcagcagacggcgaaccggccccgattaaaaaggtgattgtaaagatcaaggaaaattaatgagattcttataatggagcgttcctttcgcggggaacgcttttttttaccatagaaaggcctgtcggcaggaatcctgccgctgcaccccgatgccgccgaaaagttacagttcaccccgaaatcccccggcgaaaaaatccccctgaaacaaaaaaatgtggagttttccccccgttgttttccaactataatggaattacaaagaaacgaaggggtggaatcatgaaaacgaaacggctgacatacagtaacttctatttttacctgctgcttcttgctccgattctggcggtctatattctgttttttgtcattccggtggtatccagtatgtttttcagtctgacgaattttaacgggatcagcctgaattttaaatgggtcggattcaacaattacgatgtggcgtttcatgacaaggtgtttaagaaggccatggtcaacaccttcctgtttgctctgggagcgacggtgttccagaatctgtttgcaatcgtgtttgcaatggcgctgaatacgaaaattaaatctaaaaattttctccggatgcttctttttgccccctgtatgctgtctcccgtggtggtggcatttatctggcagtttatctatatgccggatggcatgctgaaccatctgctgggaaccgacatcacatggctgggaaacaggaagaccgcgcttttctgtgtggtgatcgcacatgtgtggatgtggatcggttattcctccaccatctatatgtccaacttacagagtatatcgacggatattctggaagcggcggctatcgacggggcagggccgtggcagaagtttaaaagcattaccctgccgatgctggcgccggccacaaccatcaatgtgacgcttgcgtttactcagtcgctcaaggtattcgacattgtctatgccatgacgaacggcgggccgcttaactctacggaaacagtgggaacgtacgtggtcgccaacatgaaccggggactccacggttacgcgtcggctcagacagtactcttaaccattgtgatcgtcctgtttgggcaggtgttaatcggagtgctgaaaaagcgagaggaggcgatctactgatgaaaaccagaaaaaaacaactgctctttctgtttgagctgctgatggccaccgcctgtatcctgatgttctacccggtcattatgatggttctcgtgtccttaaaggatgaggcgcttctggcgggcgaacctttaagcctgagaaccagcttcgcctttgaaaattacgtaaccgcggctaaggggatgaaatactggagggcactgtttaactcttccgttctgacggtatgcagttctctgcttaccacgtttttcggggcatgcggagcgtatgccatcatgcgggcgagaagagggaaacaactgtttctggcgctgaacgcgctgttcctgattggtctggcactgccgcagcaggtggccatggtgcctctcgtcttatggatgcagaaacttcacgtggccaatacactgtttggactgattctggcgtttatcggagccaatgcggcttatggagtgttcttcttttccggctttgtcaataccgttcccgtcacactggaggaggccgcttatatcgacggcgccagtccgtttactacgtttatcagaatcgtgtttcctctgcttaaaccgcccatggtaacacttctgatcgtgatcgctttgagggtctggaataatttcatgtatcccctgctgcttctgcagggccagaattccaggacgctgcctcttacggtatttttctttaagggtgacttatcaattcagtggaatatcctgtttgcggccaccaccctggtaatcctgccgctgatgatcgtctattttattcttcagaaacagattatttccgggatgttaaacggctcggtgaagggctgatcagtaaaatgctatgaaaacaaattcataataaatggatacaaggaggaagaaacatgagaaaaagaaaagcagcagtatggttcgtggcagcagccatggtaatgggaactctggcaggatgcggacagaaggcggcgccggagacgacagcggcacagaccggtgagacgaagaaggaagagacgggcgccgcggcagaagagacgaaggcggaagcacagaagccggtagaacaggtggagcttaaagtgtttggatttaagacgggagcggaggaaggcgcaattccggagctgatcgaacagtttaacaaagagaatccggatatcaaagtggtgtacgaagggatcagtaatgcaggcggctatcaggacgtgcttacagccaggctggcttccggccagggggacgacgtgttcttcgctaatccaaattatctgccgcagcttcaggaagcgggctacaccgaggatttatccgatatgcctgtggtagcgcagtacagcggacttgtcaaggatttactgaccattaacgacagcattccggggctgggcatggaggtagctgtgttcggtatgttttccaatctcgatgtgctgaaagaggtggggattgatcacgccccggccaactatcaggaatttctggaggactgtgagattctgaaaaaagcagggaagacaccgatcgtggcgggagccaaggacggcacgggagtcgctgttttatccatggccaagagcatggatccggtctaccaggcggcagataagatggatcagatcgccaggatgaacagcggagaactgaaattcggtgacgtgatgcagccgggcttcgcgctggtggaagatttgatctccaggggatatctggatggaagcaaggcccttgtctatgcggcaggtcaggatgatattgcagaatttgcaaagggagaagccggatttatgcctggcggaagctggtttgtggcaggacttgacagtgcggctccggatatgaactatactctgggcggcatcccggtggaggatgaggattctctgatcctgatcaatgccggtgtacgcgtctgcatcaacagttcttcggagaaaaaggaagtagcccggaaattcgtggaatttttcaccggactggacagcatgaacgcctatgtggcaagccagaacagctttaatccgcgtatggatggagtcagcacggacaacgatgtggtgacgccggcagcggagcgtttaagcgccgcccgcatggttccgtgggtggattctgccttcgacatcgcggtagtcagcccgtgggcggatgcccggaccttcacggccaatgtcgcgggaggagattccgtggacaatgcagtgaaggacttaaacacgcaggttgagaataacctgaagctgaaatagtgcaggccggcagccgcaggagtgagtcttgcggctgccttttaactatgctaaaatgacaccagaaaggggggccggacatgtatcggatactgattgcggacgacgagttctgggtaggacggtggctgagccaggtcttaaaggagagtccctttgaggtggaggtggcgggaatcagcgagaatggggaggaggcgcttaaggctctgacggacaccagacccgatattttaattacagacatcaacatgccgttgatcgacggccttgatgtgctgaaacggctggaggaagcgggagaaaagcttccgaaaaccattgtcatatccggctatgacgaatttgagtatgcaaggcgggccattgaactggaggtcatggcttatctgctgaagcctctggagcggtcggcggtctacgaagcggtagaaaaggctgtcgcggcgctggaaaaggagcaggagagaaaggcgcagacccgggacggattcacggcgggggtggaaaatatcctgacggagtatctgcgaagtcccggtgatgagacgaaacggaggctttgccgccttatggattccgaacaggggcggagcggattttacgaactggcgctgtttcagatgcgccgtctggaaaaatccgccctgacgagggaggagatgcgcagccgtcttgaggaagccgcagccggaaaggccatttatctctgtcccctggaccgttttacctggggagtcctgattacggatattgtaaaacctgccggcttccggctggatgagagtgtgctggtgaagctgctccacaactatgagtacgggctgagcgaggcccatggagatccgggagagattgatgaggcgtttgcggaggcgagggaatcgattattctgcgtctgggacgggaagggaagacagaggcgtttccggtatcggaatccgatctttatacagactttataacggcgttaaaagccggaaatatggagcggcttaaggaatgtaccgctcaggcctgcggcctctttattcagaagggttacgacttgaccagctgcctgaatttctatttcgtgctgtccggtgaggtgatcaagctgttaaacgaccggtataaggagcagaacaggacggagtacttggcgctgatcgaggaaggctatgatttttctgtccgcattcggaattactacagcatccgttccatctgccaccggtttgaggagtatgccggaaaggccgcgtcctgtctgaaggaagaggactgcatggatgtggcggtgatcgtgaagcggattcagcgtgaaatcagggaacattacagtgaggatatcagtcttgcctgggtggcggatgaatacggaatcaatcccagctatttcagcaagaagttcaaggatgagacgggagtcaattttatcgattatctgacggaggtgcggatcgggcaggcgaaggagctattaagccacacgaacctttccgtcagtgccgtcagcctccgggtgggattcaaggaggcaaagtatttcagccgggtctttgcctccttgacgggggaaaaaccgtcggaatacagggagagagtaaagcgggagggggaattgcgtgaagagagtgcggattaagacgtggatggagagccgtttgaacagaaaaatatttttaagctttctgacggtctccctgattcctctgtgcattgtctactgttatattaattccgcctattccgagaagttaaggagcgatgcgttcatgcagaaccagctgacggagcggaacacggcggttttgctggaggattacttaacgaaaatcgaatatatttccaatctctttttcgacagcgatacccaggccatgatacgcggcgcgtctgacccgttaagcagctacagtgcccgcatggcgctggagaagaaggtgcgggtaaatctcgatctgtttaaggtgatggcctatgtggaccaggttacatttttaaagcaggatggaacggccataaatgtgatgaattccctgggatacgcggataccatccctttttctgcgccgcaggaagacgtgggaaagcggtttaaaaaccagagactcatgcggggcgacaagctgaatgaaagctgtacggataaatacgtctatttacgccagatcgacgatctggatatgggaaacggaaccctgggctggctttttatcgtgtttgacagggatcagttcgatctgcttctgcaggatctgcgcgcggtgctgaatacggagatcgtcatggacgacgggcagctgctctatgacacgacgaatggcgggccggatgcggtgaaccgtctgcgggccgcctcagtctcctattcggcgccgtcgaaggagaggagacgggcagagcggatatcctgggactatcacatcgagaacctgggaatcagcgtcacatttttcgacgacatgaagggcgtggaaagcaatatccgcgcattaagcatcatgacaggaacggtgatcttcgtaaccgtgctcattatactggcggcttcgttccttttctctgaaacgatcgtccgcccggtgaccaggcttcacaggaatttagtccgggtgaaggaaggcgactacaccgtccgggtgcaggtcgagacaagggatgaggtgggcgatctctgcgaggcgtttaacggcatggcggaggagattgaccgcctggtaaatcaggtttactccgtggaactgaaggaaaaggaggcggccatcaaggcgctgcaggctcagataaaccctcattttctctataacacgctgggtatgatcaagagcatggcggagcttaacggagccctgcaggtgtctgagatgatcatggccctgtcgaagctgttccgctatgcgactcatacagacggcgttctcgtcacgatacgggaagagttggaaaacctgtccagctatatgaccatcgtcaatgccagatttggcggacggattgaatttgctgccagagttccggaggagctgctgacagagtccatcgtaaaggtctgcttacagcctctggtggaaaatgccatctcccatggacttggcagaggccgcgccggaggaaggattgcagtaaccgtagaaaaagagaatggaatcatcacggttacggtggaggacaacggcggcggaattttgccggaccggctggaggagatacgaaaccgtctggagaggaaagaacacgtggaggagtccggcaggggacatgtgggattaaagaatatccacgacagaatcaggctctattatggagagacgtacggtattgtgattgacagctttccggaaagagggaccgtggtgacactgtcctacccgtcagatggggggccggatcgggagaatggaaaggagacagagaattgaaagagcgaccgaatattttatttctgatgacagatgagcagcgttacgacgcagccggctgggtgaacagccaggtacatacgccggttcttaaccggctggcggaagaatccgtatggttttcccgtgcctataccacgaatccgtcatgcattccggccagggcggctgtctttaccgggcgatatccatcccagtgcggcgtaccgggctatgtcagctgtcttcccaaaagggaaaccacatttatgaagtatttgcaggatggaggctactacacggcggtcatcgggaagcagcatttctggcgctctgagatcgagcgcggatatgattatgaggatattgtggatgaacatgaaccgccggcggtgatctcgaaggaactgccggaaggggcatttggccttccggccaacaagacggtatcggaccgggtgtccagctatgtggaatttctggcggacagcggtttcaccagtggatcccagctataccgggagattaacagcaagggaatttatgaatttacaggagaagagaagtaccatgtggatgcctatatcggcgacaggggaagaaaatggctggaggaatcctgtcccggcgacagaccatggtttctgacgctttcctttccggggccgcacatgccctttgacggaatcggactgccggatgagaaagcttacgaagagacggaactggatttaccggagaccgggctttccgatttattcgaaaagccgccgcattatctcgatatcgcaaggaaattcgggagtatcgacctaaagaaccacacgtctccggatgggctcaccccggatgaaatccggctgatgaaaaaggcctattatgccaacgtgacgctgattgacaggaaaatcggtcaggtgatcgaggttcttaagaagaagggactttacgaaaacactcttattttattcacttcggatcacggagattttatgggtgaatttggaatcgccacgaaggcccagtactgctcagaggctcttatgaggattccgtttctgttaaagcctccgttttccgggttcaaaggccgcagagaggacagctttatcagctcagtggaaatcgccgcgacctgtcttacggcggcaggaattgccgtcccggaatccgtgatgggccggagcctgacccagttttacgaagacggggaaaaagaaagatggcaggacgtctacatggaagcgagagacatccgggccatccgggatgaacattataagctgatttattatcagaaccggagctatggcgagttctacgatcttcagaacgatccgtacgagaagtataacttatgggatgatcctctgcttcagggtcggaaatacgaactgatgaagcggcttatagaccggctgatcgaccttggagagggggctgagacggtctggaatatcggcgctccggtgatatagttgtcagatctttaagtgtcccgtttatgcagggctccagccgtcatttcccgagagcacggcggggagtgaatattttatgattcgtactaaatatatacattttacgacaaatttgcaatagaaatgattgacttctaattcacaaagtgagataatgtcttaaactgtgaatggaattaattcaaaatgtggatggaaataaaaatgcatatggggacgggggcttgccttccgtctccgttgcattcttatccatggaggagagaatggagaaggaatacctgctgtttgatctggacggaacactgaccgatccaaaagaaggcatcacgaaatccgtgcgccatgcccttaaggcctatgacatcgaggtggaggatttagattccctctgctgttttatcggcccgccgctgaaggacagcttcatcgagtactacggcttcagcgaggagaacgcgtccaatgcaattggcgtttaccgggaatatttttccgaccgtgggatctttgaaaacgaagtttatgagggcatcgaggaggtgctgaaggcactgaaggcctcagggaaaaagctgttcgtggcttcgtcgaagcccgaggtttttgtcaggaaaattatggagtattttaagctggatccgtattttacctttatgggaggcgcggatttaggcgagaccagagtgaagaaagcggatgtgatccgctacgtccttgaggaaaacggaattaccgatctggagaaagtgatcatgatcggagaccggaaacacgatattttaggggcgaaggaagtcggagtcgacagcgtcggcgtcctctatggttatggagaccgggaggaactggaagccgcgggagcggactttctggcggaaacagtttttgatttgcagaatcttttatagtgtggtatgatacacagtattatggcgcttaaggaatagttttggctgacggcgaagaggaacgccttaaggaggagacgcattatgattgaactgggaaaagaaaagagacagataatcagaacgctttgcggacaggcggataatgtactggtgcacggagcggttcagggatatatgggccgtgtgtgggtgccggagctgacgaatccatcgtactgcctgattcatctgggtgatttcgcatacctgtttggcatatgcccaaagggtgagcaggccatggaactgagagcacagctttacagggaatgcggccaggactacatcaccccagccgatgaaagatgggctgaatggctggaagaatcctttccgggagaatacagggttttatcccggtattcgatgagaagggacaggaaccatttttcggaggaggcactggaatcctactgcaggaatctgcctgccggaattcgattaaaaagaattgataagagactgtaccagacggcgcttaaggaggaatggagccgcgatttctgctccaattttgaaactccggaagaatatgaaaagaacggcctcggttttgtcgccatggatggcagaaagattgtttccggctgttctgcctatggaatcagcgagggaatgtttgagatccaggtggagacccggagagagtatcagcggaagggcctggcgctggcgtgcagcgcccgtttcatactcacgtgtctggaacagggaatctacccgagctgggatgcgatcagcctgcagtccgtcggactggctgaaaagctgggctatatttttgacagagaatacaaagtgtatcagctccatgatatggagagcggccttttaatggcgtaaccggacatttggaggaatacgagcgatgaaaagagtaaaagtcggattctgggggattgattcaatcctggaatttgtaaaaataaccggcagcagccgtcataagatggaactggtctgcggcagtacggtagtggatgccaaatcacttttgtccgtgctgtccgttaaggcagcccaggcagtggaactggtgattcatgaggagagctgcgaccgtctgctggagcggctggacccttatatcgagcatggcagtctgttggacagggcccatcatttgagtgcctgacaaaagaacggaagccgccgggatgcttctctgcagggccagcagccttcagaaagaaaactgacaggaaaaggaacttgaaaaattgagtaaagtggtgtatactaatgctataaaaataagatgaattgtaattcctggaatgttcgatactcttacctactttgaacctacattttgacattcgggattccaatatttttaagcggatgtcaggcctcctttattgagtggaaggcagaagcttaagtgaggtcgcccacctagcaaggctaggcgtcaaacagtaagaaccggcattttggggttacaaaagaaaaaagcagcgagaaatcgctgctttaactttttacaaaagtatgataatgtatacatagggcagtgcccttatcttaaaaatacaggagaataatatgaaggaaacgaaattcaggaattatatatgctggggagtaaccgcgctggcggtgatcgcgctgagtatcgcgtttgctttttttcttacacgatttcaggtgatgaaggcgggacttaaagcatttatcggcatcctgatgccggtgatctatggtgcggtcctggcatatctgcttcttccgatttataacaggacgagaagccttcttgaaggatggattgcgaagggcataaaaaaggaaaagacaatcaggggattatcgaaggccggagcgacagccgtaagcctgatcgttctttttgtgattgtcgcgggactgttctggatggtgattccgcagatttatacgagtattatgacgctgcaggaagggctgggggagaatattaacaacctggcgctgtggcttcagaagcttctggaggataatccgtctctggaacagaaggtaatcccgatgtacgacgaggtgaccaatcagctggaaaactggctgaccacctccctggtaccgaatgtgtcgacggtgatcagcggtctttccagcggtcttttaagtgttgtgctggcgcttaagaacattctgatcggcgttatcgttatggtatacctgttaaacataaaagagactctttccgcacagggaaagaagatcatttacagtgtacttccgctgcggatggcgaaccagtttattgaggaactccgttttgtccatcgggtgtttggcggtttcattacgggtaagctgctggattccctgattatcggcattatctgctttgtctgcttaaactggatgaagatgccgtacgtactgctggtcagcgtgatcgtgggcgtgacgaatgtgattccgtttttcggcccgtttatcggagctgtcccgagcgcctttttaatacttctggtgagcccgatgaagtgtctgtatttcctgattttcatcgtacttcttcagcagtttgacggcaacattttaggcccgaagattttaggacagtctaccgggcttccaagcttctgggtgctgttttccatcctgctgttcggcggtctgttcggatttgtcggtatgatcattgcagttcccacctttgccgtgggctacagtatgcttaccgggctggtaaaccgggctctcaggaaaaaagagctctcccttaatactaacgactacatggatttaaaacacatcgatgaagagaagaaaacttatatgagataagaggagcgcatgaataaaaggaaatttattgcatttgcagccggaattcctcttctggttctcattttaattatcatcatcctggtcagtgaaccgaagccgggtgggatatcgagagcggcggcctataagtcggccgcccttcttttgacagatgccgaaagctgtgagcagctgcttaaggagcaggggcagaactattttacggagaaagacaggaatcactggtatgcgaaatatttgaactatctttatgtgaacggatatgtatctccggacacgaccccatccgatccggagtacgtacagggatacctgacgtaccgggaggcggaggaactggcagaggcgctgtccccgggacagggggaaccggcccgcgtgggaaaaaagaagcagggcaaaccgtttccatcggataactggtggtttatttacgacagcctcagaaaagaactggatcacgatggcagcataaaggaacggaatatcctcctttacggtacgcccatgaatataaggagcgctccggcctggaccgcatatacgagcgaaggcaaattccgctttgagggaatcagcctcgacagctacatagactgggagctgaaggtcctggtaaaaggcggcgagatgatcgcagtcagggaaccggtgagcgattccgtcacctataagaatgtctggcttacccacggtgagggagacacgttttcggtccgtctgggaactgtcgatcggtcgtttcccatggaggcctctttggggcagccggaggaatttgcggataatctggcggacttgtctttaaagaacgggaagcttcagaaggtaaccctgaagaaaaagagaattaccggaaaggttctggcggtaaaggacgattccattgagatagaaggctacggaaagattaaactggataaggatttcaaggtgtataagctgtacggtcagttcgaggagcagtctgtctcggacattctcgtcggctacgacatccaggaattcgtcgtggcgcatggaaagctgtgcgcggcgctgaccatgcgggagttcgatgcgaagaccatacgggtcatgatcatgaatacgaatttccagtctgtattccatccgtcggtcaccttatcggcggagagtggcttaaaccttgcaagcggggaagagagcgttcagataccggcgaaggccgaagtgattatcgatccgtcggatgagcggctgaaggacggccggattgtcgtcacccctgtggaggccggcgacaccataaccgttaattccatccgccgttccctgggaacgccaacgtacagcggcagtatcgagatcaggaaggagaacgaagggattaccctgattaacgagttgtatctggaagactatctgaccagggtagtgcccagtgagatgcctgacagctatgagatggaggcgctaaaggcccaggcggtctgtgcgaggacgtacgcctaccgtcagattcagagcaacgcctacagccagtacggcgcccatgtggacgacagtaccagatttcaggtgtataataacttaaaaacttcggataagacggagcaggctgtgcgggagacatacggaaagcttctgttctatcaggatgtgcccattgaagcgttttatttctccacctcctgcggccacacgacagacggcagcatctggggaagcgatccggccaagtatccgtatctggacggctgtcttctggagggcggacgaagtgttttgaatctgtccaccaatgcggcgtttgaagcattcatcaaagataaggagtatccatcctatgattcgtcctttccgatgtaccggtgggagactacggtaaccaaccggcagctggaggaggagataactgcggtgggaactattttgaatatttccgtcaccgagcgtggagtgggcggcatagtgaaaaaggtgcgtgtggaaggctccgatggaattatgacgatcaacggggagggacaggtgagagcaaagcttggcaatccttatatgaagatcacgaagaatgacggaactgtcatgaaggatatcgaatctctgcccagcgcctatatagccattgagaatgagggcgtggatgataacaatatcaccaccttccatatctacggcggcggctatggccacggcgtcggcatgagccagaacggggcccaggctatggcgtcggagggaaagagctatgaggagattcttcagttcttttatcagggagtagaagtcagagaagcagaaaaggaaggggaccagtgacgggaaagaacccgaatacgaccatgctgtcacgcgtatgatagactaaaagagtaatcgggaagcatatgcagaaccaaaagctggaaaatctgttaaacctggcgctcagcgccacggaagaggaacgggaaaaatcagagtcattaaatgtaggctataattctgaccagaatacatgggaactgatcgtcaaatattccggaagccttgacgaggcagcagaacacggggtcaccgtggaggagatgatcaatgagtacgcgattctcacggtgccggaatcggagatcgactatatcagcagtctgcctcaaatcgaatacgtggaaaaaccaaagaggctgttctttgccatcaaccaggcaaaggcagcctcctgcattaatattgcgcagcagggggacaggagcctgtcaggcagaggcgttctgacggcgatcatcgattcggggatcgattattaccacgacgatttccggaaggagaacggagacacccgcattgtcatgctctgggaccagacgcttaaccgggtgtttacggaggaggagattaacgaagcgctggcagcagggagccgggcggccgcacgagcgcttgtaccttctgtggatacgagcggccatggcacggctgtggccggaatcgcggcgggcaacggaagggaaaataacgggcagtaccgcggaatcgcctatgagagcgagcttctggtggttaagctgggtgtgccgaagagcgacggctttccgagaacgacggagctgatgcgggcggtcaattttgtggtgagagaggccgtgcgcaggagacagccggtggcggtcaatttgagcttcggcaacacgtacggttcccatgacggcaccagtcttctggaaacatttctcaacgatatatccaattacggaaaaacggtgtttgtggtgggaacgggaaatgaaggcgcgggagacggtcacagtgccgggcagctggtgatgaaccagccgcaggaggtggaactgacggtcggggcttatcagaccagcttcagtgttcagctctggaagtcctatacggatatctttgatatcagcttaatcacgccatccggagagaccatcggcccggtcagcagccgtctggggccgcagacaatcccgtttgtgaaccagacgatcctcctctattacggaaaaccgggcccctacagcgtggcgcaggagatctatctggatttcattcccaaagaaaattacctggaggaggggctctggaggattcgtctgactccccgggagattgtcgagggaaattttgatttctggctgccttccgccagtgtactgagccgttccacccgttttttaaggccgtcgccggagacgacactgaccattccgtcaacggcggcgggcgtcatatctgtcggagcctacgatgacgcctaccagtcttttgccgatttttccggccgcggttttacgagaatgacgcgtcaggtgaaaccggatctggtcgcccccggcgtcggaattattaccgccagatcgggcggcggttatgagacggtgacaggaacctcctttgccacgccatttgtgacgggaagcgcggcgctgctgatgcagtgggggattgtggacggaagagatccgtttctgtacggcgagaaaataaaggcttatttaaggcggggcgccaggcatctgcccggatattcccagtggccgaatccggagctggggtttggaaccttgtgcctgtcggacagcattccgatataaagcgggttcaccggaaaaaatttaataattagaaaatattagaaaatatgcacaataatcgcttgcggctcccggataaacatgttatactttactcgtaaattgaatactcggttgaagaatccgggagagaccgcagatcagcggcggcgccgaaggtgagaaaaactctcaggcaaaaggaccggatttggacgaaactctggaaaggtgacagacaccaccgacgaggcagctttccggctgagcgttttcccggaccggtcgcagtgcatttacagactggatcagagaagggaaccgtaacagaggaaggtaatctttcaggtacgaagacggggcatataacgaattgcgttgtatgccttttttgtgttcaaaatttaacaatcttgattggaggaaggaaaacatggaatgtaaaacgactttatatgatactcatgtaaagtatggggggaagatggtgccgtttgccggatatctcctgccggtgcagtacgggaccggagtcattgcggaacacatggctgtacggacggcctgcggcctgttcgacgtgtcccatatgggagagattctgtgtgagggagaaggcgctctcgacaatttaaaccatttgctgaccaatgactttacggggatggcggatggccaggccagatacagcccgatgtgcaacgaggagggcggcgtggtggatgacctgattgtgtacaagatcagagacaatcactattttatcgtggtaaatgctgccaacaaggataaggattttgcatggatgacggcccacagtcttccgggcgccgagttaaaagacatctcggcggagataggacagctggccctccaggggccgaaggcaaaggagattcttctgaaactgacggaggaaacgaatctgccggtaaaatactatacctgccttgcagaccgtccggtggccggaatccgctgtatcatttccaaaaccgggtataccggggaggacggttacgagctctatatggctgccgggaaggctccggaactttttgaagcgctgatggaggccggaaaagaggaagggttaattccatgcggtctgggagcgagggatactttgagactggaagctgccatgcctctgtacggtcatgagatggatgataccattacaccgatagagacaggactttcctttgccgtgaagatgaaaaaggaagactttatcggaaaagcggctatcgaggcgaagggagaaccggcgcggaccagggtcggtttgaaggtgacaggccggggcattatccgggaacatgagaccgtctatgcggatggcggggagatcggcgtgaccacatccgggacccatgtcccctatttaaaatgcccggttgccatggcccttgtaaaaaaagaatatgccgttctaggcacaaaggtggaggcggatgtgagaggacgccggattgaagcggaggtcgtcccgctgccgttttataaaagagtgaaataaccataccaaataaaatcaaaaatggaggaaaaaacaatgacatatccagaaaatttaaagtatgcaaaatcacacgagtgggtggagttcttagaagacggttcagccaggatcggtatgacagattatgcccaggaccagatgggggatctcgtatttgtaaaccttccggagccggaggatgaggtgacggcaggcgaggcgttcggcgatgtggagtcggtaaaggccgtttccgatgtttactctccggttaccggcgtggttgcggagatcaatgaggacctgctggacagtccggagagcatcaattccgacccgtacggagcctggatgatccgcgtttccggcattcaggataaagaagaactgatgagtgcacaggaatatgaggagttcgtcaaagaataagaactttgaacagcagaaggagaatgcatatggggtcttacctatccagcaccgatgatcagcagaaggcaatgctcgatgaaatcggttataaagattacgatgatttgttcggctgtgtgccggattccgtgaagctaaagagacggctctctgttccggagggcagatcagaacttgaactgtaccggcatatggcgtccatggcgggcagaaaccgcgtgttcgaccatgtgttccgcggggcgggagcgtaccgccattacataccggctattgtaaaagaggtggtctccaaagaggagttcgtcaccgcctataccccgtatcaggcggagatcagccaggggaatcttcaggctatttttgaataccagaccatgatctgtgaactgacagggctggatgcagccaatgcgtcggtctatgacggcgcatctgcggctgcagagagtgtcttcatgtgccgtgagcgcaagagggtcagagtcctggcagcagacacggcacatccggatgtactggcagcgatggagacgtactgccacggcagaggtgctttcgtggaactggttccgtcaaaggacgggagcgtggattttgaggcgctgaaggggatgcttgatgagacagtggcctgtttctatgtacagcagcccaattactacggtattctggaagatgtaaccgccatatcggaactggttcacgaagccggcggcaaggtgattgcaggctgtaatcctatctctctggcggttcttaagacgccggccgaatgcggcgccgatatcgcagtgggagaaggacagccgctgggacttcctatggctttcggcggtccttacctgggatttatggcgacgacgcgggatatgatgaggaaactccccggccgtattgtgggtgagacggtggattccgatggaaaaaggggctttgttctgactctgcaggcgagagaacagcatatccgccgggaaaaagcaggcagcaacatctgctccaatcaggcgctgtgcgcactgacggcctccgtctatctgtcagcgatgggaccgcaggggcttagggaggcggcgctccagtgcacctcaaaagcccattatctgagagaaaaactgaaagaagccggattgatgccggtctatgacaagccatttttccacgagtttgtgacagagtgccctgtagatacagagcagttgtctgccaggctggaggaagaagggttcttaggcggtctgcctttaccgggcggacgcatactctggtgtgcgacagagatgaatacgaaggaggagatggaccgtctggcctgtctcgtaaaggaggtgtgctgcgcatgaaactgatatttgaacgaagcgtacatgggcgtcactgccagattcttccgtcatccgatgtgccgtatgtgatgccggaacacggaagggagcttccgctgcgccttcccgaggtatcggaaaatgacataagccgccattatacggaactggcaaaagcaacccatggtgtcaatgacggctgctatcccctcggttcctgcaccatgaaatacaatcccaagatcaatgaggagatagccggcctcccgggatttaccggaattcatccgctgcagccggaatccactgttcagggtgccttggaggtccttaaaacggcggaggagattttcagcgagataaccggaatggacagcatgacgttccagccggcggcaggcgctcacggcgaatttacaggactgctgctgatccgtgcctggcacgagagccgtggagatgagaaacggacgaagatcatcgttccggactccgcccatggaacgaatccggccagcgcggccatggccggctacaaggtaatcaatattccatccacagccgacggtcttgtggatttggagaagcttcgggaggctgtcggagaagataccgcaggccttatgctgaccaatcccaacacagtagggctctttgacccgaatattttagagatcacgaagattgtccatgacgcaggcggcctctgctattatgacggcgcaaaccttaacgcggtcatgggaattacaaggcccggagacatgggcttcgacgtggttcatttaaatctgcacaagaccttttccacgcctcacggcggcggcggcccgggaagcggcccggtgggctgcaagaaattcctggaaccgttcctgccgggacggaaggtggtggaacgggatggagtgctctgtacggcgccttacgggcagtccatcggaatggtaaaagagttctgcggcaatttccttgtggtggtgaaagcactttcctatgttctgacgctgggacccgacggcattgctgacgcctgcagaaacgcggtattaaatgcaaattacgtcagagtcaagctttcggacgattaccacatgccgtttaaacagacgtgcatgcatgaatttgtcatgagtctggagcaggaaaaggaagagatggaggtgacggccatggacatcgccaaggcccttctggaccacggaatccatccgccgaccatgtacttcccgctgattgtccacgaggctctgatggtagaaccgactgagacagaatcaaaggagaacttggatgaactgatctccgtgttccatgagatttatgagacggcgaagcgcgatcctgaatatatccggaattctcctcatgtcaccctggtgaagcgtctggatgaggtaaatgcggccagaaatccgaaactgcattacgcattcggagaggaagcttcagaaagggaagagacgtgatccgccttctgagcctggctcatgggccggggacgtacccctatcccaacttcggcatggaggagtatctgctgtaccatgtggaggaagaggagtgcattctctacctgtggcagaacgagaaaaccgtagtcataggcaggaaccagaatgcatggaaagaatgccgcagagaagaactggaagcggcgggcggccatctggtaagacgtctgtcaggcggcggcgccgtgttccacgatctggggaatttaaactttacgtttatcacaagaaaagaaaactacgatgtcacaaaacagacggaggtcatcttacgggcagtgaaaaagctgggcatccatgcggaacggaccggccgcaacgatattactgcagaaggccgcaagttttccggcaacgcatactatgagaccggggacttctgctgtcaccacgggaccattctgctctctgtggacaaagaagagatggcccgctatttaaacgtctccagggaaaaactgaaatccaaaagcgtggattccgtcagaagccgtgtaaccaatttatgcgagttcgttccggatctgacggtccgccgcatgggccaatgtctggaggaaagctttggtgaggtctatggccttcccgtcagaccatttccgccggaacgcatggacgaaagtgaggcagcagagcggaccgcgcgctttgcctcctgggactggaaatacggcaggaagattccgttcagtgacgagtccgcagtccgtttttcgtggggggaagtccaggtactggttcttgtggaacagggccgcgtccgggaagcaaagatctggtccgatgcgctggatacagactttataaaggccgcggaggaggctctgggcggcatggtctggagcagaaatgcggcagcggcccgtttcagtgccctatcctgtgtaacgctccttcaggagacgatgcggcgggacttacaggacgtgatctgcaatatgatagaaagataactggcagaaagccatacaggaggattggatggaaaaacactacgatctcatcgtaatcggtgcggggccgggaggctatatggcggctctttatgcgtcgaaggcgggaaaaagaacggccgtgatcgagcggtcccatgtgggaggcacgtgtttaaactgtggctgcattcctacgaaaacgtatcttcacaccaccggccttttccgggaggttaagaagacagaggcggcgggccttcatacggagggcatgcacgtttccatggccgaactgaagaagcggaaggacgccgtggtggaagaattacgcgccggcatcgagaagcagctggcagccgcgaagatcgacttatacagggggaacggcgtggtctgcggagatcatctggtaaaggttatgccggaaggagcggagcttaccgcagagtatatcctgctggcagccggttctgagccatcgtcccttcccattcccggcatggatctgcctggtgtaaaaaacagcaccgggattctggaggaggagacagttccggaccgtctcataatcatagggggcggagtaatcggcatggagtttgcaaccgtctataatgatctgggctgtcaggtgacggtactggaagccatggacaagattctgccgggaatggacaaagagatttcccagaacttaaagatgattatgaagaaacgcggcgtcgagattcataccggagccatggtttcttcgattgaaaagatgggggacggaacgtatctctgccgctatacggaaaaagagaaggcctgtgagtgctccgctccgctgatcttatcggcagtcggccgccgtccctgcggcagcggtttattctccggggaaatgcaggaacgcatcaaaatggaacgtggccgtatcctggtcgacgagcgcggtgagacctctgtccccggaatttacgcggcgggagacgtcatcggcggcgtctgccttgcccatgtggcctctgccgagggctaccgggcagtttcagccatgttcccggaactgaagggaaaagacatggcggtaatcccatcctgtgtttacaccgatccggagattgcctgtgccggcctcaccgccgacgaggcaaaagccgccggcatagaggctgttacgggaaaatatattatgtccgtaaatggaaagtcagtgttgtccatgcaggatcgcggcttcttaaaaatagtcgcggaaaaggataccggccgcatcctgggcgccgggctcatgtgcgccagagcaaccgatatgatcggcgaactggaactggctgtttcaaagggactgacggccgaggatctggcagcggtgatcatgccgcatccgacgttctgcgaaggaatcggagaggccgcagaatcattatgtatggaaaagaagaataaataaaacaggaaactcccatggaattcagggcttttagcggtacctggttttccgtgggagcttcttcctttttttcgttaaaaatgctgaatcgcatgaggaagaacatggcgcggcatccatcgcaaaaaatcaaaaacattaaatatagggtattaaagttactgaaaatatgatataatgtaacataactttgggtttttatttaatggaataagcgaggatccttccgccgcttaaggcggagggccggatgattgagacaggatggaggtgactcatgaatatcagggaatctacggaatcctgggaagcagaaacgttaagtccttacgcctcactcagcaggaattcgaaaggaagggacagagaggaagaaccgtgtgacatacggcccgtttatcagcgtgaccgtgaccggattattcactgtaaagcatttcgcaggctgaagcacaagacacaggtctttctggcgccggaaggcgaccactaccggacgcggcttacccatactctggaggtagcgcagattgctaggaccattgccagggcgctgcgcatgaacgaggatctgacagaggccatagcactggggcacgatctggggcatacgcccttcggccattccggggaggcggttctgggcaagatctgctcggaaggatttgcccactaccggcagagcgtccgggtggtggaggttctggaaaaaaacgggagaggccttaatttaacctgggaagtccgcgacggcatcttaaaccacagaacgagcggaagaccgtctacgctggagggaaagattgtacggctgtccgataagatcgcatacatcaatcacgatatcgacgatgcgatccgcgccaggatgtttgtggaggaagatctgcctgcgtgttttacggatgtcctgggacacagcgtacgggagcgtctgaataatctgatacatgatattatcctgggaagcatcgggaagccggagattatcatgtcgccccatatggaggaagccatgcaggggctccgcacctggatgttcgagaacgtataccggagcgacgtacccaaggcggaagaaggaaaggcccagcatctcattgtgatgctgtttaactattatatggagcatacggataagctcccggcggaataccattatctgatggatgtacgccatgaaaaccgtgaacgcgtggtatgcgattacatagcggggatgagtgacagctacgccatcgacaagttcgaagagctgttcgtcccaaaggcctggaaggatatctgacagttaagggaatcagggaggtgtgaaatttcatgcgatatccggaagaagtagtagaagaagtcaggatgaaaaacgatatcgtggatgtgatttcaggatacgtgaagctgcagaagaaggggagcaactacttcggactctgcccgtttcacaatgagaaatcaccttccttttccgtgtcgccctccaaacagatgtattactgttttggctgcggcgccggaggcaatgtgattacgtttgtgatggaatatgagaattattcctttatggaagcgcttcagatgctggccgacagggccggtgtggcgcttccgaagcaggagtacagcaaagaagcgaaggaggctgcggatctgcggacggccctgctggagattaaccgcatggcggcgaattattactattaccagctcaccaatccgcagggtgaggcgggctaccggtatttgagggacaggcagctgtccgacgataccatccgccatttcggacttggttttgccaataagaccagtgacgatttataccggtatttaagggcaaaaggatacgacgacaggatcttaaaggagacaggtctggtcaccatcgaggaacggggagcccatgacaagttctggaaccgcgtcatgttccccatcatggatgtgaataaccgcgtcattggtttcggcggccgtgtgatgggagccggggaaccgaaatacttaaactctccggagacgaagctgttcgataaaagccggaatctttacggtctgaactatgcaagactttccagggaaaaatacatactgatctgcgaaggctatatggatgtcatcgccatgcaccaggccggcttcaccaatgcggtggcgtcactgggaacggcatttacgacgcagcatgcggcgctcttaaagcgctacacggataaggtggttctgacgtacgacagcgacggagcggggacgaaggccgctctgagggcgatcccgattctgcgcgatgtcggcatgtccatccgggtgctgaacatgcagccgtacaaagatcctgatgaatttatcaagaacatgggggccgaagcgttccgtgagcggatcgaacaggcgagaaacagctttttattcgaaattgatgtgctgaaaagaaactacgagatggaagatccggagcagaagaccgaattctataatcaggtggcaaagaagctctgtgaatttccggaagccctggagcgggacaactatttagaagctgtgtcgcgggaattttttatcaattacgaggacttaaagcgtctggtaaaccgcatgggggcgagactggggccggtgtctccccgtgaggaggaagaaagcacgtctgtcaagaagaaaaaggacagggaagacgggaaaaatcagtcccaaaggcttctcctcacatggctgatcgagaatccgttcctgtttgacaagatagagggaattatcactcccgatgattttattgaagatctgtaccatcaggttgccaggatggtatttgacggacacgccgccgggaatttgaacccggcagaaatcctgaatcattttattaacgatgaagaacagtaccgggtggttgcgggactttttaatgcaagcctgaaagaatccctggataatgaagaacagaagaaggcattttcagaaacgatcatgaaggtgaaaaagaacagccttgattatgccagccgcaatgcagccgggatcgaggagctgcagagaatcatcagggaacaggcggcgttaaaggatctgcatatttcactggattagggtgaacactataggcaagctgtggaaggatggaagaacatgggcgagaatgttaagagaacggcagagaagctgtcatcatcaaagaaggtggacgaggccagggaagcagaactgagggccgcagaagaacaggctgcatttgaggaacagttgaatcagctgcttctgctggcgaaaaagaaaaaaaatgttctggaaaaccaggaagtgcttgacttctttacaggcactgtgctggatgcagaccggctggaccggatctatgatttcctggagacgaataaagtggacgttcttcagatcaatgaagatgaagacttggaactggatcccgacttatttatcgaggaggaactggaggaagaggaagaaatcgatatggagcatatcgatctctccgttcctgagggcatcagtgtcgaggaccctgtccgcatgtatttaaaggagatcggcaaggttcctctcttatccagtgacgatgagattgaactggccaagaagattgagctgggagatgaactggccaaggagaagctgaccgaagcaaacttaagactggtagtcagcatcgccaagcgttatgtgggacgcggcatgcagtttctcgatctgatccaggaaggcaatttggggcttatcaaggccgtggaaaagttcgattacaggaagggctataaattcagcacctatgcgacctggtggattcgccaggccatcacgcgcgcgattgcggaccaggcccgtaccatccggattcccgttcatatggtggagaccattaaccgtctcgtgcgggtttcgaggcagcttttacaggagctgggcagagaaccgtcgccggaggaggtcgcatcgagggtggacatgccggtggagcgggtgagggagatcatgaaggtatcccaggagccggtttccctagagactcccatcggcgaagaggaagacagtcatctgggtgacttcatccaggatgatcaggtggcagtcccggcggacgcggctacctttacgatgcttcacgagcagcttatggaggttcttgataccctgacggagagagagcagaaggtgctccgcctgcggttcggtctcgacgacggacggccgaggacgctggaagaggtcggccgggagtttaacgtgacgagagagcgtatccgccagatcgaggccaaagctctgcggaagctccgccatccgagccggagcaaaaagctgaaagactatttagacgattgatattggagctgtatatatgaaactgtcaaaacggttagaaacggttgcttcctttgttcccaaaggaagcaacattgctgatatagggacggaccacggttacgttcccatttacctggtaagagaaggcctggcagagcacgcggtagccatggatgtgagaaaaggcccgctggagcgcgctaaggcacacgtggcggaagccggactcgaaaacagaatcgatgtccgcttaagtgacggactgacagggctgaaaccgggagaagcggactgtgtcgtgatcgcgggtatggggggtgaactggtcatacatattctggaggagggacgcagcctgtgggagaccatcggatactgggtcctttccccgcagtcggaactggataaagtgcgccgtttcctggaaaaagagtcattttccattgttcgggagactatgatgaaggaagatggaaaatactatacggtgatgggggtgacccggggcggtttatccggggaaaacgactctgaaccgcattacctgtatggaagccggctgatccggcagaaaaatcctgttctcgcagaatttctgaagaaagaacaggaacagctggaacagattctggatacactaaaggacagcgatacgcccgcagccttaaaacgccgcgtggaaatgatggaaaagctggcctggaacaaggaggcacaggatgaaatgcttggaactgatacagaagcttgagacactggcgccggcggactgcgcctgtgagtgggataatgtcggtctgctggtcggctggcgggaacgggagattcacaggatcttaatcgcactggatgccacagacgaggtggtggaggaagccgtccggatgcgggcggatcttttactcacacaccatccgcttatttttaaaccgcttaaaaaggtcaatgacgatgatttcatagcccgcagggtgatggaattaattcagtacaatgtgaattattacgctatgcatacgaattttgacgcggctccaggctgtatggccgatctggcggcagagcggctgggactgtcggagacgcgtgtcctggaggttgccggaaccatggagacagacggaaggcctgtcgaatacgggatcggtaaagtggggcttcttccttccgcaatgacggtaaaggaactggcgctgctggtcaaagagcggtttcatctgccgtttatcaccgtttacggagaacatgcggcaggagagacggtaacgcgtgtggcgattgcccccggatcgggaaagagctctattgcatttgcggagaaggccggagccgaagtgctcgtcaccggcgatatcgggcatcatgaggggatcgatgccgcagccaatcatctgactgttctggatgcggggcattacggtcttgagcacctgtttatcggatttatggctgattatctggagcgtgaattcggagcgcgcctggagatccataaagcggcagcggcgtttccggcggccgtgctttaacagcctggtacattcaaagccccccgccgcaggcaacggggaaccaacaaggaggtaacagatggcattcgtaacaatcggtgatgtaacaaaggaatatcccaacgggacgacgtacctggagatcgcggaggaatatcagccgcagtacgaggacgacattctgctggtgcggataaacggaaagctccgggaacttcataagaaagtgaaatttgactgcaggctggagttctacacaggcagggatcagccgggaatccagacgtaccacaggagcgctaccttcctgatgctgaaggcattttacgatgtggtgggagtggaaaagatcgagaaggttaccgtggatttttccctcggaaaaggctattatattgaaccccacggcagctttacgctgacagaggaactgatcggccgcgtgaaggcccggatgcacgagtatgtggaagagaagatccccatcatgaagcggagcgagaatacggatgacgccattgagctgtttcacagacaccgcatgtatgacaaggaacgtctgttccgctaccgccgggtatcgcgcgtcaacatctacagcatcggcggttttgaagattactactatggctatatggtgcagaatacgggatatatcaagtattttgacctgtttctgtacgatgacggcttcatgctgatgctgccccagaaggagaatcccaaggaggtcccggtatttgaagcggagaagaaacagaagcttttccaggtgctgaaggaaagcgtaaagtggggcgaacgcctgaatgtctcccatgttggggaactgaacgaggtgatcgcgaagggagacatcagcagactgatcctgattcaggaggcccttcaggaaaagaagatcgctgagattgccgaaaaggtcacgaaagagcgggataaaaaattcgtgatgatcgcgggtccgtcgtcctccggcaagacgtcattttcccaccggctgtcgatccagctaaaggcacaggggatgattccccatccgatcggcgtggatgattactttgtcaaccgggtggacagtccgaaaaatcccgatggaagctataactacgaggtgctggaatgcctggacgtagaacagtttaacaaggatatgacggccctgctggccggtgataccgtagagatgccgcgctataattttaagacgggaatgcgggaataccacggagacatgttaaagctgggaagagacgatatcctggtaattgagggaatccactgcttgaatgaccggctttcctattcccttccggcggaaagcaaattccgcatctacgtcagcgcgctgacccagctcaacgttgacgaacacaaccggattcccaccacggactgccgcctgctgcgccgcatggtccgggatgccaggacgagaggcgcctccgcccaggatacgatccgtatgtggccgacggtgagacacggggaagagcagtatatttttccgttccaggaatccgccgatatgatgtttaactccgccacggtatatgaactggcggttttaaagcagtatgcggaaccgcttctgtttgggattccaagggagtcggaagaatatatggaggccaagcgcctgcttaagttcctggattacttcctgggggtaaacagcgagacgattcccaataactcaatcatacgggaatttatcggaggaagctgcttccgggtgtgacggcaggaacgcagtacaaaagaaaaattgatgggaatgtgaggatggaaacgtggaactggctgttattactgcggagaaaataagcgtcatgtttgtcatggcgcttatcgggatgatttgctgccggattggtctgattagcggacacaccaatgagaagctttcggatattctgcttcttctggtgtctccgctgcttatttttacctcctaccagcaggcctttgatccggagaagctttacgggcttctgactgcattcttcatggcggcggtcagccacgcagtggccattacgctcgcttcttttctggtgaaaaagggaagaacggactgggaggttgaacggatatctgcgatctattccaactgcggttttatggggattccgttggtgagcgcactgtttggcgccgacggagttttctatgcgaccgcctacatcactgtatttaatattctggtatggacgcacggagtgatcctgatgactggaaagcaggatttcaagtcattcctgacggctcttcgatccccctgtatcattgcggtggtgctggggctgttctgctacctggcgcgaatccgttttcccgccgttattctggagccgcttacggccattgccgatatgaatacgccgttagccatgctggtggccggtgtgtccattgcaggcagcgacattaaggccctgcttatgaaggtacagatctattatatctgtgccatacgtctgctcattatcccaacggtcgtccttctggtgctgaaggctttccgtctcgatgacatggtcactacggtggtcgtactggcaacagcctgccctacggcaaccacaggcacgctgtttgccctgaaattccaccggaattccggttacgcctcggagatattcggccttgccacggccagttccatcgtgacgattccgctgatgatgctgttgtgcgggctgataaacggatagggcctgagctgcagccggaattgaactgcgaaaagatttctgccggcttttctttacaaaaaggcaaatctatggtaaactaacaacgttttgagtaagacaaatggccgcagctgtgatgccgaaaggctgcagatgaggaaagtccgggcttcacagggcaggatgccagataacgtctggcggaggcgactccagggaaagtgcaacagaaatataccgcatctgcgcgtctcaccggcgcgtaagtgtaagggtggaaaggtggtgtaagagaccaccgctctcctggcaacaggaggggtccatgtaaaccccattcgaagcaagaccgaacagagagcataaggcggcccgtctgctctcgggtaggttgcttgagcctgccggcgacggcaggcctagatagatggccattcaacgacataacccggcttatcgtcttactcaaaatataaatgaaaaagccctttgccatgcgggcctgcatgatatgtcagcaggttcatgcggcagaaggctttttctgtttgaccgggaaaccgtaaatttgaagaaatatttagaaaatcctcacaggattttaatattttaggactataatggtattcagtgaatcctggaagggtgtgacgatgttgaaacaaaagagaatgcataagaggcagatgatgatctgtctggctgttctggcggtactgtcctttatgacgtttcatattctgtttaaggaccattcgccggaatcgctgtatgaagttttttccggggcagactggagatttgtggggcttagcgctgcctgtatggccgtttatctgatctgtgaggcggagagtatcagaaccctgatgggagcttttcagacgaaggttccgtttcttaggtcggcagggtattcgtttgccgatttctatttcagcgcgatcaccccgtctgcgaccgggggccagcccatgcagctttactatatgacgcgggatggattcggttttgcgcagagttccttttcccttctgactctggccgcggtataccagctgatggttctggtgtatggcgtggtcatggtaattctcaagtatccttatgtgcagagccagggacggctgattaagtggctgctcgtgttcgggatagccgtaaacggcctctgctctctgggaattcttctggtgatcttaaaaagggctctggtagagcgcattgccatgacaggaatctcgatagccgtgaaactgagaatcataaaggacagaaggaagctggagcggaaagcggagcatctgatcgatgagtacagccggggcggtgaatgcttccgcaaatatccgcaggtttttgtcaaagtgatgattttaactgcatttaggctgacggcgctgtttctgatcccgtattttgcctgtctggctcttgggatcggaggtgtggagccgcttgaattcctggcgatccaggccatactgagcctggcggtaaccgcggtaccgctgccggggtcggtcggtgcgtcggagggcagctttatgatcttatacagcggaatggttgctgcagatcatttgtttcccatgatgatgctgagcagaggaatcagcttctatggctttctggccgtcagcggtgcggcgactctggttcttcagttctggaatgccggaaagcaccgcaaaacagaggttcagacgtgattatagagagaacaggttccatgcagttggtcatatcttctccggccagctgcatttttctgtcgtgaagaaagattgaagaaggatttttggcatcttactggcaaaaaattaccactcactgcattttctgagacaaatcggagaggctggtatacaatgacatcagaagggaggcagagtatgaaaattatcatcgaaccgggagatatggaagaaccggaggtcatcatacggggacggagcggaagcgaggaggtcaggcagctgctggagcttttaggcggagcgggaggcatatcccagatcccgctgtatgcggaagaaaaggaatacttttttaagccggaggagatctgttactttctcacggagggcggaaaggtcaatgcctatctggaatccggagtctatgaggcaaaaggaaggctctatgagctggccaggcagcttcgccacagaggatttattcagatcagcaaaagcacagtcatcaacactgccatggttgcttttgtggaggtggagttcagcggcaactataccgcatttttaaaggatggaaagacaaagctgcttatttccagaaactacatgaaggattttagaaaatatattatggagggacgataatatgaaacgcttcgaagagtttttaatcagtatatttactggaattgggatcggggctgtcgtgtgtacggtaaccatggccgccatgggtggaatggacgcgacgctaaaacaggtgctggtctgggtggcggcgtctgcactgtttgccgttatttctcagattatgtgcatggattttggcaatcttctgatccgcaccgtaatccatttctgtctctgttttactctggctgctacggttgggacatttcttcactactcctcggactggatctccagcgcaagagtgatgcttcctgcatttatcatcatttatgtgattatttatgtggccatatttctcgtacgcctggctgagacgaaggaactgaataaaaagctgaaagaaccggaataaacgaaaaaagaatcatgacagactgatgtgagctctgtcatgattctttttttatttccactggttatttggaatacttttcctcacagtacatgcagcggtaggtctccgtctcagaatcggccagatagaagatatgcggcagttcctgctcgatggaggtgatgcagcgcgggttcttgcagtggatgacattggtaatctttttcggaagctttaaggttctcttttccgcaatctgattgtcgcggataatgttaaccgtaatgttgtgatcgatatagccgagaatgtcgagatcgatgtggtccaggccaccctcaatcttaatgatatccttgcgtcccatcttgctgctctttgcgttcttgataatggcaacctggcagtctaacttgtccagtcccaggttatagtagatgtccaggctcttgccggcctgaatgtggtctaatacgatgccttcgtttaatccgctgatatttaacatggtttttctacctccagtaatgtcatgataagggccatgcgcacgtatacgccgtactgggcctgtttaaagtaggcggctctcgggtcgttgtctacttcgacggagatttcgttgactctgggaagcgggtgaagaacgtacatgtcttccttggccagcttcattttgtccttatcgagaatgtagcagtcttttaaacgaatgtaatcttcctcgttgaagaaacgttccttctgtacgcgggtcatatagagaatgtcgagagacggcatggcctcgtcgaggctgtccatttccacgaactcgatgttgttcgcttttaatacgtcttctctgatgtattcgggaacgcgcagctccggtggggagatgaggacgaacttaatgttctcatagcggaccagagcgttgatcagggagtggacggtacggccgaacttcaaatcgccgcagaggccgatggttaagtcgtgcagccggccttttaaagagcggatggacagtaagtccgtgagcgtctgggtcgggtgctgatggccgccgtcaccggcgttgatcaccggaatgccggagtgtgtggctgctactaacggagcgccttccttgggatgtctcatggcacagatatcagcgtaacaggaaatcacgcggatcgtatcggccacgctctcgcctttggctgccgaactggaatcggcagaagaaaagccgagtacgctgccacctaaatttaacatggctgcttcaaaactcaaacgagttcttgtacttggctcataaaataacgtcgctaattttttaccgtcacatacgtgggaatattccgaaaggtgatgttcaatatcgtctgccagatcgagcagctgaccggtttcttccacactaaagtctaatgggtttaataaatgtctcataagaatctcctttgtctgtttttcaatccgcattctggaagtgaatccaaaatggtatggcagcagggctgctgaattctttcaccattatatagtatctcttaaaatatttccatacttttttacaaaaaaagtgcctgtaaggaatatttaaggaactttaagaaaaataaggaagaccggatggcaaacctgttgtataatggcagtatgagaaaaggagccgcgttacgtgctcatagcgaggaggtatctgctttggcggaagaaaacagggaagagaagagtaagaagatacctatgattcaggtgaaaaatctctacaaagtatataaagtcggcgataccaaggtctatgctttgggaggggtcgactttacggtatataagggagaattttgtgcgattgtcggtccttccggctctggaaagtccacacttcttaatatgatggccggtctggagaagccctcgaagggggagattgtcattgccgggaaacatattgagaagctgacggagaatcagctggtcgctttccggcggaagcatgtgggctttatctttcagtcctacaatctgcttcagacgatgaatgccgtagagaatgtggcgctgccgctttcgttccgcggtgtccccaagaagaaacggaacgagaaggcggtaaagtacatcaagctggtcggtctggagaagcagatgaagcatatggccaacgagatgtccggcggccagcagcagcgtgtgggtattgccagagcactggcggtggacccgcagatcatttttgcagatgagcctaccggtaatctggattcgaagacgacgaaggagatcctgtggctgatgaggaagattgtgcgggagcagaatcagacgcttgtcatggtaactcatgataattatattgccgggtttgccgaccggcagttacatattgtagacggcaagatcttcaagatcgaagaacaacaccatgatgataccgaggaggagacagagaatgaagaagagaggtaacagagtactggcagggctgcttgccgtactggtagtgctgggggccgtgccggttcagacgatgggagcgcagtacgggatacagaagaataagtatctcgacgtcaagaagactccaaccggaaagaccggccagaatatgaccatcagcatgatatttgacaacagcaaggggagcgaggatttacagggcgtatccgtccggtttgacgacagtgcggtggacagcgaatacgacgcggcggaagacccggatgaagagacccggtataacggttccatctttccgttcgagattacctccagcatctttgatgccaaagtaatcggttctgtaaaagcgggagcgaccaagaccgtttccttatctgcgagagtcagaagagatatagccgagggctattattccgtaccgattatcgtgaaagcaaacggcagcgatgccacgacggaccatatcaatgtctggatcaccaagtccagcggaaccacggaatcgggagacgatgagggatcgatccggttcgaactgggggaaaaccagtccactccgtccggccagtatccggatgtgatgaatttcaccgtaaacttacgcaacgcgtcgaatattacggcatttgatgtcaacgtgcgtatggggttaagcgaggacagcacaaaattcccctttaacatcaacgacggtaactatgtgagacattttgacagggtcggcggcggagagacccaggaggtctcctacagcatggccattcgcaaggaagcgtacaccggatactatcccattacctttacaatcgaatacagggacagtaccgagggcgacattcagaaagcggaatccattttctacgttcacgtccagaacaaggacaaggaagaggagacgaaagagttcaatgccaatgacagaacgagagccagactgatcgtcgacggattccagacgaatccggaggtggtttacgcaggcgatgaattcgacctgatactccgtatgaagaacgcctccgagaacgtggcggccagcaacatcctgttcaccctggaatcggaaaaggttacggacagtgctgtatttaccacggattccggttcttcctccattgtggtgaattccctggccgcaggccagagcacggagcttaagatccgcatgagggcaggcgcgtgggtagaccagagaacatatgccataaccatcaacgagaagtatgacagcccggagtataagaatgcggaggaaaaggttaccgttgatattccggtgaagcagatggccagattaaatacaggaacgattgaggtgatgcctgacacgatgtcagtgggcgcggaaagcaatgtcatgttcccgattaataatacaggcaaggtgcttctgtataatgttatggtcacatttgtgggagattccattcagcagacagattcctatgtgggaaatattaagccgggagagtctaagaccgtggatgccatggtgagcggcgtgacgcctactacagatgacggcaaggtcaaaattctgattacctacgaggatgagaacggcgtcgtcagcgatccgatcgagaaggagatgacgctgatggtcacggaggagatggagccggaggatggaatgctcgacgatatgggagcgtttccggcagatacagagccagccggcattaaaaaatatcagaagtttttaatccccggtatcattgcggtacttgtaattgcaacggcagcggcggtagtggtcctgaagaagcgtaaaaagaagaaggaagcagaagaagaggacatagacgatgaaatttagcgatttgctttccatgagcgtgaataatttaagacgaagaaagttgaggacattcctgaccgttctgggagttgtaattggtacggcttccatcgtggttatggtgtccctgggtatcggcctgaatgaactcacgatggaacagattgcctcatacgggagcctgacagagatatcaatctactcggatgcaatgtggggagggaatacacaggacggcaaagagcccaattacatgacggatgaagtaattgaaaaattccgaaagcttaaccacgtatcctcggtgtcacccatcctgaatttttatgtcattatgaaacagggcgtctatcaggcgaacgtcaacttaacgggtgttacgagagagtatatgaaaaatatacccttaaaggaaggaagtcttccggcggcagacagtcaggaactggagatggtggtgggaaaccagattcccatgcgttttcacaatccaaagtcgagagggaatgtatacatgttctctaacgacccggcagacgcaccggatgttgattttatgaaccggcccatgtttgtgattttcgatacgaatgcatattaccagagccagaacggatcctctgcggacgatgaaaaccctgtgagggcgcctaaaaaatatatgctgaaaactgcggcgatggtaggcggcgaagattataataactacagcttcagcgtctatgtggatattgatatactgaaagcacagttaaaacaggtgtttaaaaagaatccgattccggatcagccgacgaataagaagggaaagccctataactattttatctatgaccaggcggttgtggaagtggacgacatgaaaaatgtgagtgaggtccagaaaataatcaatgatatgggatttcaggcctccagccagatggactggctggagcagtcacagaagcagtccaacatggtacagggagtacttggcggcatcggcgccgtttccctgttcgtagctgccatcggaatcgccaataccatgatgatgtccatctatgaaagaacgaaggagatcggtattatcaaggtactgggctgtgatatgagaaatattaagaacatgttccttctggaatcaggatttatcggtttcatgggaggtgtgatcggaatcttgctgagttacggaatctcctttattgccaacaagtttttatcggggcagtttctggttggaatagaaggcgatttatcgagaattccgccgtggctttcattagcggcgattggatttgccatcttcgtgggtatggcagccggcttcttcccggcgctgcgcgccatgaagctaagtcctctggcagcgatccgcaacgaatagaaagtgggcggatcgtcgtcatcaccgccggaccgcggccggaccgccgcggaaatgcctgctgccgggagagcacaggtacaggaaaaaatacttgcaattcaaacaggaatattatatgatgtttgaagaggtacgtgcgactggcggataagtggagaaacaccacggggagcacgttacagttaaagccgaccgcctgggcaccgctttggggtatccaggcggttttttgcgtcctgatttcggacgtcaccacgattgaggaggaaagaagatgaacatgatttcactgaaggacgacttgagaggcaattcctatccgggaagagggattatcatcggaaaaacgccagatgggaaaaaggcggttaccgcttattttattatgggaagaagcgagaacagccgcaaccgcgtatttgtggaggacggagagggaatccgtactcaggcgtttgatccgtcaaagcttacggaccccagcctgatcatctatgcaccggtccgggttttgggaaacaagacgattgtgaccaatggtgaccagacggatacgatctacgagggcatggacaggcagatgacctttgaacagtctttgagaagccgtgagtttgaaccggacagccccaactataccccccggatctccggaattatgcatgtacggggaaactctgacggtgatgcttcggaagcaggcggctacaattatgccatgtccatcttaaaaagcagcaatggaaatcctgagtcctgctgccgctatacatttgcttatgaaaatcctgctgccggcgagggccattttatccatacctacatgcatgacggcaatccgcttccaagctttgaaggagagcccaaactggtggagaccatggatgacatcgatgcgtttgccagcctgctgtgggagaatttaaacgaggacaataaggtgtccctgtttgtacggtatattacgattgccacaggcgagtatgaaacgcgcattgtgaataaaaaccagtgattttttacgaaaaggagaaagagcgatgaaagaattagaactgaagtatggctgcaacccgaatcagaaaccgtccagaatctttgtcaagaacggagaactgccgatcgaggtgctgagcggccgtccgggctatattaatttcatggatgccttcaatggctggcagctggtaaaggaactgaaggaagcgacaggacttccggcagcggcttcctttaagcacgtgtctccggcgggagcggcagttggccttccgttagatgagacgttgagaaagatttactgggtggatgatatgggggagctctccccgctggcatcagcctatgccagagcgagaggcgctgaccgcatgtcttcctttggcgatttcatctctctgtccgacgtctgcgatgtggatacggccaggattatcaagcgggaagtctccgacggcgtcattgctcccggatatgagccggaggctctggagattttaaagtccaagaagaacggcagttacaatgtgatcgccatcgacccggagtacagaccggagccgatcgagcgcaagcaggtatacggcattgtatttgagcagggaagaaatgaactgaagatcgatgaggagctgcttaaggaagtcgtgactgtcaataaggagattccggattctgcaaagatcgatctgattatctctctgatcactctgaaatatacccagtccaactccgtgtgcttcgcaaagggaggccaggccatcggcatcggcgcagggcagcagtcccgcgttcactgtacgcggctggcgggcaataaggcggataactggttcttacgccagtgcccgaaggtgttaaatctgccctttgccgacaagatccgccgcgcggaccgcgacaacgccattgacgtctacatcggtgaggactatatggacgtgctggcagacggcagatgggagaatattttcagggagaaaccggaggtgtttacaaaagaggagaagagagcatggctggaccagatgacagacgtggccctcggttccgatgcgttcttccccttcggcgataatattgacagagcttataaaagcggcgtgaagtatgtggcacagccgggcggatcagtccgtgacgatcaggtaatcgagacctgtgacaaatacggcatggcaatggcgtttacgggaatccgcctgttccaccattaaaataaaagaagtataagcctatattttttgtaaaagcactttaaaaggaaagacggcataaaatgagagtaagtaagttttaaggcggctttctttgaaaacttttcccaaacctttaactgcgcgagaggaacgagagtgtctggaacgataccaggaaggggatcaggaggcgagagccacactcatcgagcggaatatgcgtctggtggcgcatgtggccaagaagtatcagaatacagattatgatatggaggacctcctgtctgtaggaaccatcggtctcatcaaggccgtcaatacgtttcacacggacagggggtcaagactcgccacctacgccgcaaagtgtgtggaaaatgaaatcctcatgctccttcgtgccaataaaaaatattcaaaagaggtgtctttatttgagcccatcggagtagacaaggatggtgaaaccgtcagtctggtggatgtcatagagatggagaacaaggaggctctggagaccatcattttgagtcaggacatcagggaactgtacgatgcatttgaccactgtctcagagacacggagaaaaaggttatcggtatgcggtacggactgtacggcggaaaggagcacacccagcgggaaatcgccgatatgctgggaatatccaggtcctatgtcagccggatcgagaagaaatccattgagaaattacgtatggaattcgagaaaaacaataagaaatcaggaattattaaataagtataaaaaatgtctaaataatttgttgactttttcctagagttctggtatagtatgaattaagttaatacgagatggattgttactggtaagcaggcaaaaccaattttgatcaatgaaaatataactttattttcgctggcagaattggtttttttatttgtaggtgaagtatgaaaattgacaagattatcaacaataacattgtcagtgccatagaagcggatggaaaagaagttgttatcatgggccggggactgggatttggaatgaagcccgggaaggagattccggagggaaagatcgagaaggtctttcggttagacagccagaacagcacggataagtttaaagagctgctggcgaatctgcctctggagcacattcaggcctccacggagatcatcaattatgcgaaaagcgtgttgaaccgtcgattgaaccagagcatctatatcacactgacagatcatattaattttgccattgaacgatttaaagaaagaatggtgtttaccaatccgctgttaaacgagatcaagacgttctacaaggaagaatacctggtcggcgaatacgccgtagctctgattgaacgaaggattggaattaaacttccggtggacgaggcgggatttattgcgcttcatatcgtaaatgcagaatataatacagtcatgcgggacacgattgatattacaaacttaattcagaatgttgtaaaaatcgtgaaagaatatttttccatggatttagatgaaacttcgctgaattaccagcgctttgtcactcatctgcgtttcctggcccagcggattatcggaggagagatgttaaacagcgagaatccggaatttaatcagctgatcagccagatgtatccggaggaatacgcatgcagcctgaagttaaaggattatatccaggtgacctatcaccatgatgtgaccgaagaagaaacggcatatctggctgtccatataaagagaataagaatgtaaggagaagaaaggagattgaggaaacatgtttaattcattaaaaaagatgttttcaggaagtgagaaggagagagagaagatccttgctcccgtagagggaaaggtggtaccgttaagcgaggtcagcgatccgaccttcagccaggagattcttggaaaaggagtcgctgttattcctgcaaaggggagaatcgtggcgccggccagcggtgttctgaccgttatgtttgagacaaagcacgccgtcagcgtaacgactgacggaggcgctgagatcatcgtccatgtgggccttgataccgtaaatttaaagggagagcattacacctcctataagaagcagggagagcatgtcaaagcgggagagctccttctggagtttgacatcgatgcgatcaaggaagcgggctacgatgtgattacaccaatcatcgtatgcaatacgccgaattatccggatatggtatgccataccggcatggaagtaaaggaactggatccgattatcgaattataggactgggcgatcaatgagggagtttttatatgaagtgaaagaccccatgggctttcacgcaagaccggcttcacggctgtttatgaaggcaagagaatttgactgccggattgacattgccgcggaaggggaaacggtagatggaaagaaccttctggctctgatgggtctcgagatcagagaaggggagctgcttcggttccggttcgagggaaccgatgaggcagaggcggagaaggcacttttagaggtgctggaccagatatgatttgaacctgtgatgggcacaggatcagataaataaatgtccgctaggacaaaagaaaggggtttctttattatgatgaagtatttgcagaaattgggtaagtcattgatgctcccggtagcggttctcccggcagcaggtatcctcatgggtatcggttactggattgacccgacaggctggggcgccaacagcgccatcgcagcattccttatcaaggcgggcggtgcaattattgacaatatggcaattctgtttgccattggtgttgctgttggtatggcggatgatcacgagggtacagccggtcttgccggtctggtttcctggctgatgattcagaccatcctttccacaggtgttgttgccatgttaaagggcatcgacgctggggaagtaaatgcagcttttggtaaaatcaacaaccagtttatcggtatcttatccggtatcatcggttccacctgctataaccggtttaaaaacacgaagcttccggacgcgctggcattcttcagcggcaagcgttctgttgcgatcgtaacggctctggcttctctcgttgcctgccttgtattattctttgtatggccggtagtttactccgcactggtagcatttggtgaggcaattcttggtcttggcgcagtaggtgcaggtatttacggtttcttcaaccgtctgctgattcctgtcggccttcaccatgcactgaactctgtattctggttcgacgttgcaggtgtgaatgaccttggaaacttctgggcaggcacaggtacattgggcgtaaccggacagtacatgacaggtttcttcccggttatgatgtttggtcttccggcagcagctctggcaatgtatcacacagcaaaacctggcaagaagaaagttgcatacggtttattactggctgcagcagtatgttccttctttacaggcgttacagaacctctggaattcgcattcatgttcttagcaccaggcttatacttaatccatgcgttattaacaggtatttccttagcgatctgtgcgctgcttcctgtccgcgcaggcttcaacttcagcgccggttttgttgactggttcttaagcttcaaggctccgatggcagtgaatcctctgttcatcatcccgatcggcctgatctatggcgtgatctactacgtcgtattccgtttcgcaatcgtgaagttcaacttcaagacaccgggacgtgaggatgacgatgacattgatgagaatcaggtaacattagcgaacaacgactatactcaggttgcttccattatcctggaaggactcggtggaaaaggcaatatcaagagtgttgacaactgtatcacaagactgagactggaaatcaacgattacacactggttaacgaaaagaagatcaaatctgcaggcgttgcaggcgtaatcagaccaggaaagaccagcgtacaggttattgttggtacccaggtacagtttgtagcagatgaatttaagaaattatgtcagtaatctgacatggagacagccgggcgggtgaccgttccggctgttttactgtatccggagcgggatcagtcaatcggttttattggttcagctatgctggagcgggaaaataaatgttaaatttatgtgaaaaggatgaacgaaaggagatttttgtggtagaataggaaaagaacacagaacagcaaaggaaaatatgcagatatgagagaaaaaaaagaaacattacaggaacaggaagagccgtttgatctgaaaaaagagatatttgaatgggtgaagattattattgcggcagcggctatcgcgttctgcctcaacacctttatcatagccaacagcacggtgccctccggttccatggaaacgacgatcatgacaggagacagaatcatcggttccagactggcctataagttcggcggagaccctgagcggggagatatcgtcattttcgatcataagacaggccccggcgataaggagactcgtctggtaaagcgaattatcggacttccaggagagacggtggagatcagggacaatcagttatatatcgacggagtcctgctggacgagccgtatttgagagaggcgatggattccgaggactatcattttgaagtgccggatggctgctatctgatgctcggcgacaaccgcaattattctgcagacgccagatactggccagacccttatgtgccggagaaaaagatactggcaaaggttctcttccgatattatcccagaattggaaaaattgaatagacgaaagaaacttcttgaccttccagttactggaaggtctattttataggatagaagattacttccataatataaaaatcagtagaaagagcagtgtatcacagctgcacagacagggaggaacgggaggatgaaacaggaaaacaatctgacggaaggaaatgtgtttcgggttctgctggaattttccataccatttgtaattgccaatgtgattcaggcgctgtatggcgctgtggatctgcttgtaatcggcaaatactgtacgccggaaagtgtcgctgcggtttccacgggaacgcaggttacacagatcatcaccagcatgattacgggtcttacgctcggcggaaccatcatggtgggaaaatatacggggatgaacgcgaaggtggaggtgaagaagaccattggaaccacactgtctatttttggagcagccgccctggtattaacggttctgatgatcatcttttcgccggcagtcttaagactgttaaagacgccggaggagtcgtttgaactggcaaagcagtacgtgatcctgtgcagctgcggaatcatctttatctgcggttacaacgcgatcagcgccattctgcgcggatacggggattccaaacggcccatgatgtttatcgccctggcctgtgtactgaatatcatcggtgatgtggtgctcacgggcattctgggcctgggagtggcaggcgttgccattgccaccatcggatcacaggcggtcagcatgatctgcgcgatctggtatctgaaccgaaaccgttttatttttacgttccgattctctaatttaaaaattgaccgggataaggcgctggagctggcaaaggtggggatccccatctccctgcaggaatgtatggtgcggctttccttcctctatctcaccagtgtgaccaaccgtctcggcgtctatgcggcggcggcagtgggagtagccagcaagtatgacgtgtttgccatgctgccggccacctccatcgccaatgcgctggctgcgattacagcccagaattacggggcgggaaagccggagcgggcgagacgttccctggcagccggacttgccttcgctgtggcagcctcctccgtgttctggctgtgggcccaggtgtctccgcagaccatgatcggaatcttttcagataatcaggacatcatagcggcgggaattccgttctttacatcgtgcagctatgattatctggcggtcagtttcgtattctgtctaaatggttacttaaatggccgcgcaaagaccatttttaccatgatcagctgctgcttcggagcactggctttgcgcatgccgctgatctggctggtttatacccgctggccggataatctgttccggatcggaaccattgcgcccatggtgtccggatttatggcctgctatacccttatttacgtaatctgcggcttttggaaggagagaaacgagagaagggtttccaaaagcgcttaaggggaatatattactagaaaaagcaaagacagatgactatgtttcatatcctggttttagtcctggccctctgcatggacacgtttgtggccagcatggcttatggcgcaaataaagtgcatattacatgggaaaaaatcgttgccatgaatgccgtctgcagcggctgtctgggcattgcgctggcggcgggcagtatactggatgatctcgttccggagacgatgacccggacggtgtgttttatcagccttttccttctgggcatcgtgaagcttctcgattatttcatcaagaaatacattaacaggcacgtaagcctgcacaagggaatcacgttttctttttcaggtctccgggtgattgtcaatatctatggagatcccatggcggcagactgggaccattcccagtcgctgtcgtggaaagaagttttgtttctgtccttcgccatgtcgatcgacagcctgattgcgggagccctctccgcatttctggaaataccggtgggactgacgatggggacggcgtttatcatggggatcgtggtgatggctgcaggtctttttttaggcagaaagctggcggcccgctgcaaatgcgatctgtcctggatcagtggcgtgctgtttatgattctggccgtgacaaaaagcctctcatgagttatactatgaacacctggcagagtttcagaataccaggtgacaggagataagatatatgaaaattactgtaccgcattattacagccggtttcagtgcgtggcgggtcaatgtccggatacgtgctgcgccggctggcagattatgatcgatgagacatctttaaaaaaatacaggaaaagaagagattccttcggcagccggctgaagaattccattgactgggaaaattctgcgttccgccagtataacggacgctgtgcctttttagatgaaaacaatctctgcgacatctattcggaagcggggccttccatgctctgccggacctgccgggcgtatccaaggcatatcgaggagtttgagggggtgagggagatttctctgtcgctgtcgtgtccggaggcggcaaagctgattctggactgcaaggagccggtacggttcctgagtaaagagacggagaaggaggagacgtatccttcttttgatttctttctttatacgaagcttatggattgcagagatttcatcatttccaccttacagaaccgggagctggactggaatctgcgcgcgggaatcgtgctggggctggctcatgacttacagcgcagaatcgtaaatgaccgtctgtatgagactgattccctgctggagcgttacggaaggaagggggctgtcgaaaagctggcctccaggcttttggcgtatcagattgacggggatagctgttttgaggggatgaaagaactgttcggcttccttgacgggctggaggtgttaaacgccggctggccggattatatcgggcgtatgaaggaagtgctttacggagccggagaagacgcttatgaggagcagagacaggaattttatgagtacctggagtcggaggaagagcggctggagacgtgggagcggtggtctgagcagctgatggtctactttgtatttacctggttctgcggtgcggaatacgatgaacgcccctatgggaagatgaagctggccgtggtgagcacgctcctgatccgtgagacggcgcaggcactgtggaaagagcagggcggcgtactggaaaaggacgcgttttttgaggccgcgcgccgctattcaagggaggtggaacactcggatttgaatctggagcgcctggagactttgttccgcgagaagaaggtctgcagcctggaccggctgcttacactggtcatggggtaacatgaaaataaatagaaaaagaagaaccggaggtacaaaaacatgtcattggaaggcaagatgaagaacggccgcttatactgcgaattcggccatgagttggaagagaacagggcatatgagcagaagatcgaataccagcgggtacattgtaaggagctggtctatgattataatcagacaagaccgtcgaatgtaaaggaaaaacggagaattttagatgaacttctggcggaagcgggtgaggaaatctggattgaatcccccgcctttttttcgtacggctgcaatacgcatattggtcatcatttttattctaatttcaatctgtgtgtcgtcgatgactgtgaagtctttatcggcaactacgtgatgtttgggccgaatgtgacgcttacagtcacgggacatcctgtctggggagaataccgccgcaagggcgctcagttttccctgccgatccacattggcgacgacgtatggatcggtgccaatgccatcattcttccgggagtgacgatcggaaatgatgtagtgatcggtgccggcagtgtggtaacccacgatattccttcccattcggtggcctttggaacgccgtgtaaggtggtgcgggagatcacggaagaagaccggctgtattaccggaaggggcagccggtgaatgaagactgggacagagattagttacacattttttagaatggttggaaaagtctgtcataaaaatgtaatatttcgtaatgataaagaaattgaaagatatttgttattttactataataaagatagaaaataactggtgcatttttatgaggaggaattgatatgaaaggaaagcgattgggttttattttgacactggtcctgatcatggcgctggctgtcccggcatgggccgcggatacgaagattgattcggtgaagctggatttctcatatgcaggggcagaaccaaagtccggcaatgagatcggcggaattcacgtgaaggtgccggatggacagccttttaccgttgaatacgcggagtattccaacgagggcgatgtctgggtagtcggcgaccggccgctggtccatgtagaactgacggcgaagagcggttaccgtttcggttccacatcgaagagcagatttacgttaaacggctgcagcgcagtctataaaaaggccagaatctacgacgacggaacacagatggaactggaagtgtatttaaagagaatcggcggaaccttaagcagcgtacagaacttagagtggggaggcaatgtggcctactgggatccgctggaaggttctaaggaatacgaagtccggctttaccgcgatgagaaatcagtagtgacggttaagacgacagacagcagttataatttctcaaacaatatggaccgcgagggctcctataccttccgtgtccgcgccattgcaagctataattccagagccggcgagtggtctgactactcggaggactactacatcgatgaagatgaggtctggtactacggcggcaacggtgcctggcagcagaacgccagaggctggtggtatgcgtattccggaggcggatatccgagaagctgctggaagctgattgacaacgcatggtactattttgacggcgacggatatatgacgacaggctggagaagggtcgacggcaattattactatcttgggccggacggcaagatgcgtaccggctggcagcagatcgacggagcgtggtactatctggacggaagcggcgtgagaaccacagactggcagtatgtgaacgggcgctggtactatatgaattccagcggtgtgatgcagattggctggcagaggatcaacggcgactggtattatctggacggaagcggagccatggcaacgggctggcagtatattaacggagcatggtactatctggatggaagcggtgtgatgtacgcagggcgctggacacctgatggaagatatgtggattataatggagtatgggttcagtaagcggctgaacgctgctgaatgaagaagggcgcatcggaaactgtctgatgcgccctttcccatgcagaacgtgatgagaaaagtctgtaatcagttttaaagaaaattagcaaataccgacgcaaacaggacggtgcatagcccggatacggcgatggcgaggctgctcatggcgccttcgacctcgcccatctccatggcctttgtggtgccgatggcgtgggaagcggatccgatggcgatccctttggcgaccggttccgtgatgtggaaaagccggcagaccgtctcggcgatgatgttgccgatgattcccgtgatgataatacaggctacagtgatcgtgacgataccgcccatctcctcagatacgcccatgccgatggctgtggtgatggattttggaagaaaggtgacatactgttcatgcgtcagcccgaagagaagcgccaggaccagaaccgttgccatggtggtcagaacaccggtcacagtccctgccagaatcgccctggcgtgctttttgagcaggcttaactgctggtaaagcggcacggccagacagacagtggcgggagtcagcagatagcttaagtatctggcgcttaaattgtagctttcatagtcaatgtggaaaactgataaaaatatcatgactgcaataatggatatcaacagtggattgaaaatgggagatttaaactttgccttgagaaacaggcccagttcatatcccatgatgctgactgctgctccaaaaaaaagaaactcttttatcatctcattcatgttccggtaccttcttttctttgtcagatcttataaaaaactgcgtgattttccctgtgacgaccatgaccaccaccgtggagaccagtgtgatgaccaggaatgggacgaggatcggccggagaagcccccaggaatccagaagtcccaccgcggcggggatgaacatcagcggcataatatcgatcagaaaaaagctggcttcccggacgctgtccaggggaatgagcttcgtacaaagccccgcgagcatgataagcagcccgtagatgctggctggaaccggcagtggaataaagtagtgaagcgcttccccgatcagggaaattatcaggatgatactgaattgtttgatgaatttcatgttttgcctcccttgatgtatcattcgtttaactacggtttatcctaaactcaaaatagccgcttgtcaaatattttttcagctgttataatacccattacattgaaaaaaacagattgataccggaaggagcttataaatcatgatcgaagcggagtttggaattctttattttctgcagtccctccatacgccatggctggatgcagtgatgaaaaatattacccatctgggagacagcggaattttctggattctcacggggcttgtgctgttctgctttaaaaagacgagacggatgggattctgtgttctgttatccctggcaggcggtttgctgatcggcaatatcttcttaaaaaatttagtggcgagagaccggccgtgctggattgatcccaccattcagctgctggtcgccagtccgaaggatttttccttcccttccggccataccatggcctcttttgaggcggcagtgagtatctttttatataaccggcgctggggagcggcggcattcgttctggctgtgctgatttcattttccagactgtatctcttcgtccattttccgtcggacgtgctgaccggacttgtgctgggggctgtgattgccgtggcggtccataagattgtggaatggagcgtgaggcagaagaaagagacggctggagaagcagaataaaaaatatttgcatttttcgtattctatgatatacttaggttcgggtagcggcagctacgaggtcattttaagctgatcatgcatggagcgctcgggtcagaatagaatgcagaaaaaataaaataagaaaagcagagtaggtttgtgtgcgttaagtgccggttgaacagggagttgtcagccggacgaaaaggtttctcttgcggtacacgaatcgcatcccgctgcatcagaagatgatacgtttattatctccggttgtagtaagaggtctgcaaaggaggtatttttttatgaaaaaattcgtcactttgttcaccgattcttacaaagaactgaaatctgtaaggaccatcaccaccgcggctatgctcgcggccatcgccatcattctgggcatgttttccatcgatgtgggcagtaccatacgaattggcttttccagtattccgaacggcgtatgcgcttatttgttcggacctgtcgtgggcggcatctttgccggaggcctggatgtgcttaagtatctgctgaagcccactggaccgtttttccccgggcttacggcagttgttatactggcaggcgtgctctatggctgtttctactataagaagcccattaccttctggagggtgcttttggccaagtttacagtcatgctgatctgcaacgtgctccttaacaccctgtgcctgtctgttttgtacggcaagggcttcatggtgattcttccggccagagtgatcaagaacctgattatgtggcccatcgattccatgatcttttacagcgtcttgaaagcgttaaacctgcttgggattttaaaggcggtccgtacgaatttcgcttaatgaaaacggctgcccccggcagtggattctgataaaaagttccaggccgcctgacggatcagctccatcttccgccgggtggcctcgttgctgtaagggacacggtcgatgagcgtatcgatgacgcctcgttcggctgcgcagcggcggctctccgggaagtttaaatcatagatatagccaaggtaggagatccacatgtccatatgggtcacacggtcggagtttttgatgggccggcggtttaagaaggatgtgagaatatggtcggagatgtcctccgcaccgagttcctctgcctcgatatccagcatggcggggatcgagtcctgttcttttacccggaaattatcgagtttatccgcatcccgtatgatcatggagtgcaggcggtcccttccggtgagagagtcatccatcaggtaaactccatgatttttgatggccgtatagatgacggaatcgtagtcccgttccggaatgaagctgcggattaagttttcgtcgaacaggatcgagaggcttaaatctgcgtggggcacgatggaatcgtcgaagctgtcatatctcttcagctgttcgaagcggccgatgtcgtggagaagcgcgatgtgcagggccagagcagtgtcctctccggagaggccgagtccttcagcgatcagccgggcagcgtccaccacgccgtaggtgtgtacgattttcagccggattttatcgtttttcgtgtcatactgctttaaatatccggcaaatattttttttgcctgtgcaaaatccatagacagaacccttctttcatactataatcttaagtgtctgcattatactacgaatcgcagacgatggcaacaggtaaaggaagagatgagaatgaggagaaggcagatcagagccatatttttcgatatagacgggacactgcgtgattttgatacgaagcgggttccggacagcacaaaagaggcgctgcggaaggcgaaggaggcaggaattctgctgtttgtcgctaccgggcgccataagcttgagatcgaggaggagaatctcctggaggatatggagtttgacggatacgttacgctgaacgggcagtactgctactgcggcagcaccgttgtatatgatgctcctattgatggtgccggggtcgcagccatgctgagactcatcgggaaagatccttttccctgcctttttatggaggctgaccgcatgtatatcaacatggtggatgaggtcgttaagaaggctcaggaggggattggaacacggatcccgccggttatggatgtgagccgggcagccgggcagccgatctaccagatcgtcccttatatcggcagaaacagggaagaagagatcaggcgcgcggttcccggatgtgagatcatccggtggcacgatgagtacgctgtggatgtgataccgcgaggcgggagtaaatgcattgggattacgcggatggcggctcatttcggcctgtctctggaggagactgcggctgtcggtgacggagcaaacgacgtttccatggtggagatggccgggctcggcattgccatggggaatggaaaagatgcagtgaaagccgtggcggattatattacggattcgatagaaacggatggcctttccagggctgtcttctatatattagagaataatcatcaggaggaatgaaacatgagtgaaacaaactgtactcataattgcaatacctgcggggagagctgcagcagcagacaggcggagcagaccagctttttagagccgttaaaccctgcaagtacggttaagaaggtaatcggtgtagtaagcggaaagggcggcgtaggaaaatcactggtaaccaccatgatggcggtccgcatgaacgcaaaaaattataagacggcaattctcgatgcggatattaccggaccctcgattccgaaggcattcggcctgggagacgacggcgtcggcatgacgccgacgggactcatgatcccggcaaccacgtccatgggcattgaagtcatgtcagctaacttaattctcgatcacgagaccgatcctgtgatctggagaggacctgtgatcgccggagcggtgaaacagttctggcaggaggctctctgggaagatatcgactatatgtttgtagatatgcctccgggaacgggtgatgttccgctgacggtattccagtctctgccggtcgacggcattatcatcgtcacctctcctcaggagctcgtatccatgattgtggcaaaggctgtgaatatggctaagaagatgaacattccgatcctcggactggtagagaatatgagctacttagaatgtccggactgcggcagaaggatttccgtattcggagagagccggattgatgaagtggcgaaggagaatgagattcctgttctcgccaagatcccgattgaacccaggattgcgaaggctgtcgatgaaggtaccgtggagtatttggaagcaccgtggctggacgaggcggtaaaagccgtggagtccatctaagaggtgttccctgacagcttaaggacaggacagcgaggtaaagatatgaatataaacatgaaccccaacagcgaactgcatcagtccattgtaaatgtaccgaatctggtacaggttccggacccgctcttagagcaggcataccagttccaggaagcgatgatgatgtacacctgtgcaatcagggagatcaagacgaagctggaggtcttaaacgacgaactgtccgtgcggaattccagaaatcctattgagatggtaaaatcccgggtgaagaagcccttaagcattgtggagaagctgcagcggagaggtcttcccataaccatggaatccatgatggagaatctcgacgatgtggcggggatccgtgtcatctgttcttttttagatgatatctatgcggttgccgacatgctgacccgtcaggatgatgtgcatatcattgctatcaaggattatatccgccatccaaaggataacggataccggagttaccatatgatcgtggagattcccgtcttcttttccgacaggaagaagtggatgcgggtagaggttcagatcaggaccattgccatggatttctgggccagtctggatcatcagctgaaatataaaaaagaggttggtgacagttcagaggaaatcagcgcggaactgaaagagtgtgcggaagtcattgcggagacggatgagcggatgctgaagatcagaatgaagatcgaagcagaaggaattacggtcagcaaatagcagttggtaaaagtgaaaatttaatatttcaaactcataagtaagaagctgacgcctttattccggtatgacggaagggcgtcagtttctgttttatcatgagactgaggatgatggactgcctgagtgatcgtgaagattcagcggcatcatcaaatggcggatcatgatctgataggcctcgttaccgttgccctcgcggagcgcacggtagtagagctcgtgttcctgaagcgtgccctccacacggccggtgaccgacagtgcggttgccgatgtcaggtggatcaaatacagaaggcgctggaacagctgattaaactcattgttctccacatagccgacgatggccagatgaaaagcgtggtcacagtcgataaaggtctgtaagccgtcgtctgcatcttttgcattccgcatctgctcaagaatctcttccagctcctccagcaggcgcttccccttttcggtagtaagctgtccggcgatcctgtgcgtgcagaaaccctcaatcgcacagcggacctcgatggtctcctgcatgtccttctccgtcaggtgacggagcataaatcccttgctggggacgatggatatgtatccatcctgacttagacactgaagtgcctctctgatgggggttctggaaatgtccagctctttggagagacgggcctcagagtagagggtatccggaagcagcttaccttccagaatctgttcttttatgtaatcgtatgctttggattgtaaaaagcttttttctttcaatgtgatacatctcctgtttgtttgacataccattattctaatatagaagttggtattggtcaatcattcttttgaggcggagaagggctgccaaatggccgtttcatttgtaaaaatatgactgattggtgttgacagtataccggtatagcggtatactggttgtaagaagcaaccgaaataataaaaagaggaggatgacgggatgtgtgtttataagatggggaatttaagagtggtggatttaacgaaggagctggacccgaagacagagagccggagatgccatatgtatcggtttaataccggaggaccgattccggattaccatacgattatggacattaccagtcatttagggacacattgtgagtgcccttatcatcacgatgacaactggccgagtgtggcggagctgccgttaactgcgtttatgggcagagccctgtatgtggatttcaaggaggatgttgcgccgggaacccacattacggcagcggatctggacaaggcgacagaaggaaggatcatggaaggcgatattgtaattattgactcttcctataagctgcccccttttaccccggctaccaacaccgaagcggacaaacgtcttttaattggaagagaaagtgccgagtggtttcgggatcataaggtaaagtgtgtcggctttggagacggagtctcaatagaaaactgcaacgaagacgttaaaccattccacgatattctgatggcagagaacatcgtctttttggaggtactgaaaaacctggataaactggagcaggacgtcttcttcatgagttattccccactcccgatccacggtctggactcctgtccggtccgcgcctatgcaattgagggactggaaggattttagaaaggcaggttttccctatgaaaatagcagtgattggcgccggagccatgggctccatctatggcggccatctatcaaagaatcatcaggtatatctggtagatacgaatccggacattgtaaagcagatcaacagcgaagggctgaaaatcgacgaggatggcgtgacgaatatctggcatccgacggcagtaaccgacacggaagggctgggggagatggacctggtcattctgtttgtgaagtccatattttccagagccgcactggcggggaaccggggcgtgattggggagaagacccgccttctgacactgcagaacggtgcggggcacgaagatattctgaaagaatttgttcctgaagagcgagtcatcataggcacaacagaggacaacggcgcagtgcttgcgccggggcatgtaagaagaggcggagttgggaatacgaacgtcgggatgctgacggaggaccgtgaaggatttcttccgcgtctgaaggaggcgtttgacagctgtggatttcatgtgaaaatccatgaaaacattcagtatctcatctgggacaagctgtttaccaatgtatccttaagcgcggtgaccggtatcctgcaggtcgatatgggattcatagccggcaacgaatacgcgtggaatttaacgaaagccctgattcacgaagcgacagcggtcgccggttcacttggcctttcctttgacgaggaaacggttacggaacgggttcgtcagacttccatcggaaatcctgccggctgtacatccatacgcgccgacttacgcgacggcagaaggactgaggtgaataccatcagcggagctgtagtgacagcggcaaagaggtgcggcgtaccagtaccgagtcatgaatttgtcgtgaatatggtacatgcgatggagatgaaaagacaggacagcagcatctgatatcaaatcaggttctgacagccagtcgaacaaggttcaaacaacaatcaaacaacaatcaaacaacaatcaaacaacaatcagccggcccgggtcagctcctgtcatcaggaaccgccccgggccggcttccatcctctacaattccggaagtacaactgtaaaagttgttccctcttcctggctgctggatactgtgattttccctttatgctgttctacaatggttctggcaatggaaagccccaggccatacccgccttcttttctcacacgcgatttgtctgtgcggtaaaaccgctcgaagatatgcttctgatcggaggacgggatcggttctcccgtattgttgacggtcagcaccgcatgatgggaagctgattttaaagagacggagaccgttccatgtaaaccggcgtatttgcaggcattgtccagaagaatggtaaccacctgtttcatctgagtttcactgccgcagacgtggatgccgggaacgatgtcgttgtttaagatgaccttgttttcaaatgcgaccgcttcaaacagcagggcgcagttcagcacactgtcgctgtaatcgaattccgtgtatgcagcgtgtgaaacttccactgtgcctgcatcggagcgggccagaaagagaagctcctccaccaactgcttcatgcgggacgcctcctcccgggtgttgtcaacccatttgagctggtttctgatcgtcgaatcctgatgggagagaagaatctgtaaattagccagaatgacggtcagcggtgtcttcagctcgtgggaggcgtcggcaataaactggttttgctgcttccacgcctgctccaccggctttaaggcccaacgggacaggaagatgctgagcagcagaaacaggagggaggcgatgaaaaacagcaggaggcagttgaagcgcagggcccggatgttgttcagctcaaagctttgatctgcaaatgcgatggtgatgctgtccggtgtctcagcgcggttatagcgcagagaataatcgtttaagacacctctcggttcctccttttccatgaccaggtccgtcagggtggcggccatgtcagcggatatggagagattgttggacttgatatcggtcactgtttttccgtcctttttaaggattatgactgcagtggggacgaaggacggcggtgcatcgtcagtccggcggcccggttccaccttattcggctttccgttttggcgggccgaatcctgggcctgcatcagggccatctctgtctggcgctccagccgccagatattgacatggtaaaaattccccagcacgatgatgagaatcgtgataaccagggacatattgatgataataaattttccgcgaagctttttcagcatgacggttcctccagacggtaccctactttccggactgttacgatttccaccctggagtttaaaaaggaaagctttttccgaagaaaggaaatataggcttccacattattgtcctccgcatcagaatcattgccccagaccctggaaatcagcgtatccttggaaatgattttgccggcattgttcataagcagctttaatacctcgaattctttatagcctaagtggattgactttcggccgcgcaaaaggtcgttggttgaaagattcaggaccagatctccaaaatgaagctcttctacgactacctcgccctgtctgcgggaaagcgcgcgtatccgtgccagcagctcttccggaacaaatggctttgtcatatagtcgtcagccccgcggtccagaccggtaaccttgtcgctgatatcgtctctggcagtcagcatcagtaccggcgtctggacgtgggcctttcgcagcttcctgaccacatcgaacccattttcacccggaagcatcacatccagaacgatgacgtcatattcgcccgacagtccgcagtagaggccgtcggtaccggtatacacaatgtctgtgtggtaatgctgctcctccataatctgtcccagtgcatcggccagtctcacttcatcttctacaatcagtatattcatgaatcatttccttccttttccggcatgaccgggctatgaaagccgacgggccatatccttacctatattataaaatggggttccgcgtttggcaatcccattccatttccagtaaccgcattttaaatagtctgaacggttataaactattatagtaaagaaagctgaaaatagcctgaaaccgcctttcaggttaatttcaggtacctgtgatagaatgggacgaatgaaaatgactgaaaaggagtttcaggttaatttcaggttactgacacaaaatgaacataggaacctgataaactgaagcagaacaacagacagagtgaagagaggagcaaatcggatgaatggaagaaaaatagccgcttccatggcggtggtgacagcggccatggctgtgatgcccataacggcagaggcttcgactaatattgacctgagaaaaaaagtgattggaatatcagggatcatgagtgtatccaacatggattccacaattacgagaggcgagtttgccagcatgctggtgaacgcgtcttcctacagaagcacggtgagcagtgtgagcaacacttcagtatttgccgatgtgccgcgagatcatgcgtatgcggcgtcgatcaggattgcggcggaacaggggtggatgacgggatatttaggcggtaatttcaaaccggatgaatcggtgacgcttcaggaggccatcaaaggggtgctggcactgctgggatatgaaaatacggattttaccggagaccagaccggagccagacagtccaaataccatttcctggagctggacgaaaatatgaataagagtccggaggaggtcctgatcaaagaggactgcatcaatctgttttataatctgttaaagaccgacacaaaggcgggaaccatgttcggaaagagcctgggatgtgaactgacctcggatggagagatcaatccgcttaccatggtggacaacagcttaaagggaccgaagatcgtgaggagcaagagccgcctttccgattatctgccgtttaaactgagcgctgccaacgtttacctcgatgggtctacgatctccaacagcagcgacgcgatcgcagcagcgctggagaatgataacggagttcttgtatattaccatccggtatcgaagaccgtatggctgtataccgtgggaagtgaaaatgagaacggccggtccgcggtatacggcgagatcactaatgtcatttataattctgccgacttgatgacgcctgacgcaatcatactggatgacggcaatacgtatgagctggacagcaccgagatgaagttcgcattttccacgtacggcgacatgcgggtgggagatacggtcactctggtctattccgtgacaacggataataacggcgacgaaacgcgcaccgtgctcgattatattgaagactgacaggagagcctgaaatgaagaaaataagttttggaaacaggtcaaaaaatggaaaaaaaacgggaaaaaaggggaaaaagcttcttctgcttctgctgatcctgcttgccgttatactgggactatacgcggcggtccggatgaaggcggagaaggcggccagtgcaaacacgaaggaggttaaaactgcggtggtggagaagcgtgacatcacctcggagctgtcgtcttcaggaacgatctccccgaagaatacatacgatatcacctctctcgtggaaggcgaggtgatatccgccgattttgaagagggggaccaggtagaggcgggacagatcctgtaccagattgacacctcttccatggaatcggagctgaccagcgtcaacaattctctgtcaagggcacaggaaaattatgaggtggctctggacgattataacacggcgctgagcgattacagcggcaatacgtataagtcgaccgagacgggatacatcatgacactatatatcaaggaaggcgataaagtaagctccaatacgaaaattgccgatatttacgatgacaaggtcatgaagatcaagctgcccttcctggccggggaagcggcgttaatcggtgcggggaacgacgcggtgctgacgctgaccgacacgggagaacagcttacgggaacggtcacggcggtgagcaatatggatgtgacgctgaccggcggccggatcgtgcggtatgtcactatcgaggctgcaaatccaggcggcctgactacggatatggccgctaccgccacgatcggggactttatctgcagctccgagggaacgtttgagccgacgctggagacggtgatgaatgcagacatctcatccagtgtggaggtgggaaagctgctggtcaacgaaggcgattacgtgggcaggggaacccctgtgttctccatggaatcgaaatcggcggaaaagctgctcagaacctataaggattccgtggaaaaagcggaggaaacgctggaatccgccaggaacaaggtggacagcacacaggataattacgataattacacgattaccgcgccgatctccggtcaggtgattacgaaaaatgtcaaggcaggcgacaaggtggcgaagagcaacagcggcagtacgacgcttgccgtgatctacgatatgtcaggctatacctttgaaatgtcggtggatgagctggatgtaaaggaagtagccgtgggacagagtgtggtgattactgcggatgcggtgagcgggaagacgttttccggcacggtgacgaatgtgagtctgcagagttcctactccaacggcgtgaccaactatccggttacggtaacgctaaatgacggcatggatgaacttctgccgggcatgaatgtggacggcgtcattatcctcgatcaggcgtcggatgtgcttacagtcccggctgatgcactgatgcgcggcaacaaggtctatgtaaaggatggtacggtaacggaggcacagggaaatataccggcaggcttccgggctgtcgacgtaaagacaggactgatcagcgatgattacgtggaaatcacagagggcctttccgaaggcgatgtggtctatgtggcagagtccacggtgaactcgtccttcaatatgatgggaggcatgcagggcggtccgggaggcatgggcggtaatccgggcggcggcgctccgggaggcggaaacagtggaggcagaagcggcggaaataacggcggcgcgcccaggtaaaggctggaggtagagacttggaagaaacattaattgaactgaaggatatctataaggtctatgagatgggcgatgaagaggtgagagccaacgacgggatctccctgacgatcaaccgcggcgaatttgtggctatcgtgggaaaatcgggaagcggaaaatcgacgctgatgaatatcatcggggctctggatgtgccgagctccggcgaatacttactgggcggaaaagatgtggggagtatgacggacaatcagctggcagatatcaggaaccggatgatcggttttattttccagcagtacaatctgcttcccaagttaaatcttctggaaaatgtagagctgccgcttctctacgcaggagccagcagcacggcccgccgcatgcgggccatggcttcgctggagcgtgtgggactcgcggaaaaatggaggaatcttccgaaccagctgtccggcggacagcagcagagggtgtctatcgccagggctctggcaggggacccgtccctgattcttgccgatgagcccaccggagcactggattccaagacgagccgcagtgtcctggatttcttaaagcagttaaacgacgaaggcaataccatcgtcatgatcacccatgacagctccatcgcaatggaggcgcggcgtgtggtgagggtccatgacggaaagatcaactttgatggagacgtaaatgaatattctgcaatcctttaaaatggcaatgaaaagtatcatgggtaataagatgcggtcctttttgaccatgctgggaatcatcatcggcgtggcctccgtcattatcctggtgagcctggtgaacggccagatgtcttatatgacggaaagcttcgcaagcatggggacgaatcagatcacggtgaatgtgaccaacctttccacccgttcggtctctgtggatgagatgtatgagttttacgaggacaacagggatttatttgcccagatgacaccgaatgtgaccgtatccacgaccgtgaagaatggaacggagtcatcgacgtccacaaccgtgtccggagtcagcgaggagtatctggagatgaaggatatggaactggagtcaggccgctttatccagtattccgatatcgtatcgcggcagaaggtatgtgtggtcggatactacgtggcgtgggacttatacggcggcgtggagaaagcgatcgatcagacgatcaagattggcgggaacgcattccggatcatcggcgtggcggcgagacaggacgacgatgaactggaatcaggcggaagcgacgatttcgtatggatgccctacagctgtgccgcgaagatgacgaggaatgccaatatcagcagctatacgtttgccacggcagatatgaatcatacggaggaggccaaaacggcaatcgatgacttcctcatggaaatctttaaggatgacgacttataccggattacggcgatgagcgagcttctggattcgctgaattccatgattgccatgatgtccatgcttctcggcggaatcgccggcatttccctgctggtagcgggcgtgggagtcatgaatatcatgctggtatcggtaaccgagcggaccagagagatcggtatccgcaaggccctgggggcgaagaagcggacgatcatgcagcagttcgtcatcgaggcggcggttaccagctccatcggcggtgtgatcggaattgtcatcggatcagcggcgactacggtcatcggcacggccatggggatgaacgcgacgccgacgcccagcgcggtggtggtgtccttcagcgtgtctgtgggcattggactgctgtttgggtatatgccggcgaatcgggcggcgaatttaaatccgattgatgcacttcgaagtgagtgagagagaaacgccgaaatcgcggcggggaggcggagccatggatctttcgtgtccgtcttgcttcctactcacgaaaagaaagtccgaacctgacgtacacgccaaatgcgggcgcgttcgtcaggttcggactttcttttcgctcgtatccagatgccggcacactgaaagatccatggctccgcctccccgccgcgatttcggctgtgtactggctatgctgggaaagacgggagggaggtttttgagagcagggttgcaaagttggaataatggtgatactatttgcatagttacagaaggagcagctcgcctggagttactcctttttaagaatgatgacatagaggagcttagaggatatgaaggttgtggatatgcactgtgacacgatttctgaactgttttacaggaaggaggagggcagggggcattcggtatggaagaatgactgccatgtggatctggagagaatggagaagggggattactgccttcagaatttcgctctgtatacgccgctggataagcatgagagaccatttgagtactgcatgaagctggtggatctgttttaccgggagatggaagaacagcgggaacggattgggattgtgaggtcgtacgaggatattctggagaatcagaggctgggaaggatgtcggccatgctgacgattgaggaaggcggcgtatgccagggggagactgcttttttaagggatttctaccgggtaggcgtgcggatgatgacgcttacgtggaattttaagaatgagctggcctggccgaatatcgtcaggatagaaggggaagaggcgtactttgaaccggatacggagcatgggctgacggagaaagggattgaatttgttgaagagatggaacggctggggatgattctggatgtgtcccatctgtcggatgcggggatcctggatgtgttccggtatacgaagaagccgtttgtggcaagccattccaatgcgagggcggtttcctccaatcccagaaatttaacggatgagatggttaagatgctatcggaacggggaggggtggccggtatcaattactgcgcggattttctgcatgactggcagaaaggggaacatgcggtgagccgggtcgatgacatgattttacatatgaaacatatgaagaaaatcggcggaattcagtgcatcggtctggggtccgatttcgatggaatcggcggggacttagaactgaaatctccggaagacttaccggtgctggaacaggccatgagaagggccggctttacggaatcagagattgaagccgtgttctttcggaatgtacttcgtgtatacaaagaaattctaaagtaagacaaaattttacatagattttacattcccgtgcatcatactttacatagatttgatatagtacttacataatcaatcaaatcatttcatgaaatccgggaggggactatgtcaatcactgatgtacagatgctgtttcaatttgtcgggggactgggaatgtttctctatggcatgaacgccatggcggacggactgcagaaatctgcgggacaccgcatgcagcagctgttgggagcattaacgaagaaccgcctgatgggcgtgattctgggagcgggaatcacagccattattcagagcagttccgccactacggttatggtcgtcggctttgtaaatgccggaattatgaatcttgggcaggcagtcggcattatcatgggcgccaatatcggaaccacggtgaccagctggatcgtatccatgagcgagtggggcgagatgctgaagccggaattctttgccccggccctggtgggtgtgggagcaatcatgacgctgttttgtaagaacagcagaaaaaagcaggtgggagagattctggtgggcttcggcgtgctgtttatcggtctcacgtttatgtcggctgccatcaccccataccgcaatgctccgatttttgcgcaggcgtttaccgtacttggaagaaatccgtttcttggcattctggcgggagctgcagtaacgggaattatccagagctcttccgcctccgtagggattttgcagacgctggcgttaaatggaatcgtgaactggcagtctgccatctttattacgctgggacagaatatcggtacgtgcgtgacggcgcttctgtccagcgtgggagccaataagacggcgaagcaggcagcagggattcatctcatgtttaatacggtgggagccatttttttcggaatcgtcatgtatatcgtttttaaactgaatccggtgtttgcgtcttccacgatcagcagtgtggagatctccatattccatacggtgtttaatgtaagcaatacccttctgctgttcccgtttgcgggctttctggttaaggcctcaagcctgctggtcagagacggtaaaagcgggaaggcggagacggagcgctcccagatgcagcgccatctcgatgagagaattttggagacgccatcttttgcgattgaaaatgccactcaggaagttattaatatgggaaaagcagcgctggaaaattttgatattgcagcggcggctttgctggataacagcagggcggaagcggaacaggtggagaagctggaagcaaagatcaaccagtatgaaaagctgcttacatcgtatctggtaaaaattaataaccagtcgttaaacgaggaacagcatctgctggttaagaatctgttttatacggtcagcaactttgaacgggtcagcgaccactgtgaaaacttatcggaactggcggtggagaaggcggacaaaaatatcgaattctcagaggatgcggcagaagagatgaaagagatgataaagaccgtccgcgctgctctggaacacgccatcaaagcgagagccggagcaggcatgtctgaggtaagggcagtggtacagagcgaggagagcgtggacatgctggaggaagaactgagagaacgccatattgagcgtctgtccagccataagtgtacgccggaaaacggtattgtcttcctggaagccttaagcaacctggaacggatttcggatcacgcccacaacattgcggggttcgtgagagatgagatgtaggaggcaagtatggaaagaatctatgtagtagaagatgacgacaatatcagggatctgatccggattgccctggaaggcttcggttacgtggtttccgcctttgagatggcggaagacgcccttaaaaatatcgaggcagatcagccggacctggcggtgtttgacctgatgcttccgggtatggatggcttgagcgccattaaaaaaatacggaaaaatgactcgctggcagacatgcccatcatcattctgactgctaaagacagagagttcgataaggtggcaggactggatggcggggccgacgattatatgacaaagcctttcggcgtcatggagctggcggccagaatcagaagtctgcttcgccgcagggccaggaaccaggctgatgaggagattttagagaagtacggaatcagtttaaataagaagacaagagaagttacgagccgtgggaaaaaggtggagctgactttaaaagaatatgagctgctcttatatctcatggaaaatcacagcagggtggcgacccgggatgaacttttaaaccacatctggggctacgattacgacggagagacgaggacgcttgacatgcacatccgcacactgcgccagaagcttggcgaggagggcgcgttctgcatccgcacagtgcgcggcgtgggataccgctttgtgaagacggaggaaggctgatatgcgaaaggccatatttgtaaaatttattcaggtaatcctggcggcgctggttttaagcagcgccatcttttatattgcagccagcagcgcactcttaaaaaactccagaacggatatgacctatacgctgcgcgccatcgacagtgtactcgactattccggtgatctggagggagaggtgaagcagctggaggaaaccgtcagcgacaacagcagccgttttactgtgatcagaaaggatggaagcgtcgctgccgataccggcatggtggatacctcctccatggataaccacctggaccgggaggagattaaggaagcgctggaatcgggaagcggttcatcccggcggtattctgatacgctgaagaaaaatatgctgtatgtggcctgcgtatccgatcactccgattatattctgcgcatggcggttccctttaccggatttaaggagtatctggtgcttctccttcctgcaatctggctcagctttctggtggcgattatgtattctgcctgctcggccgacagttttgcggcctctgtcacgaagccgcttaaggaaatatcgcaggagatgctgaaggtcaacggggactacacggaactgacctttgaaacgtaccagtatccggaaatcaatattattgcggagacgacgacggaaatgtcaaaaaacgtcaaagaatatttgaaccagattgaactggaacgtcagatccggcaggaattcttcagcaacgcttcccacgagctgaagacgccgatcacgtcggttcagggctatgcggagctgctggagagcggaattatccaggatgaggatcagaagatggatttcgtccggcggatcaaaaaagaggcggtccatatgaccagcctgatcaacgatattctgatgatttccaggctggagacgaaggaggcagaggtcgtgtgtcaggacgttcgaatggccatcgttctggatgacgtcctggaatcgctgaagccgctggccgccttccacgaggttctggtccacgcggaatgcaagccgctctgcatctacgcaaacgcgcgccagatgacggagcttctgggcaatctgctcagcaacgccatcaaatacaacaaacccggcggtgaggtctgggtgacgattacggaagaaaacagggaaatgatcatacgcgtgagggataacggtatgggaattcccaaagaatccctgggacgcatcttcgaacggttctaccgggtggacaaggggagaagccgcaagcagggaggaaccggccttggattatccattgtaaagcacatcgtaagcttctatcatggaaccattgcagtacagtctgaactggaggcggggacagaatttacggtaaagattccaatttgacagattttgtgatagaatgaagaaggctaatcacaaaaggaggtgtgcggagtatgaatcaatttgtattaacatgctgttctacggcagatatgaagaaagaatattttgacgagcgtcagattccctatgtctgcttccactacttaatggacggggtgtcctacccggacgatttgggacagagcatgccgtttgatgagttttacaacaggatttcaaaaggtgccatgccgacgacatcacaggtcaatgtggctgagttccatgatttttttggagctatattagaggagggaaaggacattctgcatatcagtctttcctccggtatttcaggaacctataattccgcctgcagcgcggtggaagaactgagagaagagtatccggaccggaagattctggttgtggactcgctgggagcgtcttccggctacggactgctggtggatgcagcagcggatctgcgtgatcagggcctttcgctggaagaggtctaccggatcacgatgaaacggagacttcacgtacatcactggttcttttccacggatcttaccagtttcaagaggggcggccgtatttcggcaacctcggccatgctgggaaccgtactaaacatatgcccgctgatgaacatggatcacgagggacatttaattccgcgccagaagatcagaacgaagaaaaaggcgatgcaggaagcggtcaggatgatggaactgcacgcggagggaaagaccggatacaaagggaaatgttttatctcctgttccgcctgcggcggcgacgcaagggccgtggcagatcttgtggaggcgcgcttcccggagctggacggaagcgtgctgatcaacagcattggaaccgtgatcggtgcccatacggggccgggaaccgtggctctgttctttttcggtgatgagagaaaggattgaaaaagagcagactgtgacagaggcattatctggcagtatttttaccgcccataccgggtatctggtatgggcgctttttttgattatcacagtaacacgtttttgggataatcaaaaatagttgactatccaactattttgtgatatagtaaatcgttggatatccaaccatttaaggaggtgaaggatggggacgaaaaattatatcagcagaggcgtatccatgatataccggcagggaaaccgtttttgtgacaggaagctggcagagtaccatattggaagcgggcagaattattttctgacctgtatttatgagcatcagggcattaatatgtatgaactggctcagctggggcatttcgacaaggggactgtgacaaaagggattcaaaaactggaagagcagggctacatccgtatgcaggctgatgaggcggacaaacgaatccggcatctgtacacaacagaaaaagcggctcctatcctggaacggctttatgaaatcagaagagagtggaatcagattctgacagaagggctgacggcggaagagagtgcacaggcagaacaattgattagtaagatggctgaaaatgcgtggaagtgcatgaatgaaagggagtcagattagaatgaatgaaaaaacaggattaaagaaagaaaacccattggggacagagccggtaggaaagctgctgctggcattttctgtcccttcgattatctcatgtctggtcaattcgatttataatatcgtagaccagatttttattggccagggagtcggctatctgggaaatgccgccacaacggtgtcgtttcccatgatgacgattgtcatggcatttgcaactctgttagggtccggaggcagcgcttacaccgccattaagctgggcgaaagagatgaaaaagaagcgaatctgacgctgaataatttattttccctctctgtcggagtgggaattatagtggccctgctgggactgatatttttggatccgatgctccgtatgttcggtgctacggatacggtcctgccgtatgccagggattacgcttcgactgtgctgatgggcgttccgttcagcgtgctgggaattaccatgtccaacatggcgagaaccgacggaaatccccgtctgtccatgtatggaattttaatcggtgcagtgttaaacacgattctggatccgatctatatcttcgtttttcactggggcgtcaaaggggcggcagtagccaccatcacttcgcagatattatccgctctgattctctgcctctatttctggaaaaaagggaatatgcgttttaaattcaagctgatgaagcctgttcctcgggtgtgcggcagagccatgactctgggggcttcctcgggaattacccagctggtggcctgtgtgatgcaggtggtgatgaataattcgctggttcattatggaaacttaagcgaagtgactggcgatgtggccctcagcgccatggggatcgttatgaagatcgtcatgattctgggctccttctgtattggaatcggagtcggttcccagccgattctgggcttcaattacggagcaggaaaatacgacagaatccggtctgcatacggtaaggcagtggtttctgctaccgtgtccatctccataggctggcttatatgccagacgatgcctcacatgattttaagattgtttggaagcggcaacgcccagtttacacagtttgccgtaaaatgtatgcggatttatctgggcggagtcttctgttccggtttccagatcgtatccactaactatttccaggcgacgggtcagcctttgaaggcgtcaattctgtctatgatgcgtcagctgatcttattaattccactgcttttaatacttccgctgtttttcggcctagatggaatcctgtatgccggaccggtggcggacgtcggttccgctgtgattgtggcgtgctttatcgtgccggaaatgaaaaaactaaacgggctggttcgtgaagagacgcggacaactgcagccggtactttgacctgacactggaggaacggaagatgaagtttgatgtaaagaaactggtggtcagcggtatgctgaccgctgtagctgtggcactgtccaccttttccataccgatcggagcgtcgaggtgtttcccggttcagcatatggtgaacgtcatggcgggagtgtttttggggccggtttacagtgtggccatcgcattttgtacttccctcatcagaaatctgcttggaacgggaagtcttcttgcattcccgggaagcatggtgggggcgctgctttgcgggctggcctaccgctgcactggaaaactgaccgctgcctgtgcggctgagatcatcggcaccggcttcctgggagcagcgctctgttatccggttgccgctgttcttatgggaaaagaggttgccctgtttttctatgtagtgccgtttttgatgagtacgctgtgcggaactgcaatcgctgcggttctgatcggtgttctttgccgttccggggcctttggatatttaaaacgccagattgcggcaaaaaaataggcggagatttactctccgccggtaatacgcgcgatcattcggttggggaggcagataatggcttccccggtccgccggatcgttccctgattgacacagaccttatccgggcagctggcctcggtgacgtgaaccgttccgtccttgatgacgatgtggttcgtccccccgttccagccttcaacggtaagctcggtgtctttatttaaatcaagtgtttctattacggttccatcgactgatatttctacttttgcaggcggttttgaaaatagaatccgtgatcctgcatagaggactgcggaaaccgccaaaataaccaggatcataaccagttcttttttcttcatttttctatttttattctctgtactcataattcgcttcctgttctctgtacttttaagcgctgctgtgatgaattagcataataaagcgtgttttacttgcatatatttccaattcttcgacaattgcccttcatagtataacacaatttccagaattatacatgaagttataaaaattttataaaataatcaaaaatcattaaaaaaaccattgcttgaagcattaagaatatgttaaaataaaaacaaagtagcaaatcgtacatttcaggaggaaatcatgaataaaggcagtttggatacgaagaaaaagggactgatcgggctgggtgcgctggtggttctggcgggagcaacaatactgggatccgatccgctttacaaggcaattgatgacatggcgcgtcctgcgatctatacggcgggaacgtatacagcgtctgcacgcggatacggcggacctgtaacagtaactgttaaggtttccacaaaggcgatcgagtcgatcgatgtagtgggagagaaagagacacttttggatcaggtagtaccttcccttccggatgcaattatcggcaagcagacgctggatatggatgcggtttccggcgccacactcagcagcaacgcaattataaaagcagtggagaaggctcttgccgaagccagaggcgaagccgtggaggaagagacgacaaaggcggaggaatccgcagcgacaggctggaatgacggtacatattcctatgaagctcctgaattcgatgacaacggatacaaggatctggtgaatatgaccatcaaagacggcaagatcaccgcgctttcctgggactgcgtggataaggacggcaagctgaagagccagctttccatggatggccagtacgtcatgacggaggatggcccgaagtggtatgagcaggcggatgccgtagtgaaatacgtgctggagaatcagtctctggacggtctgatcaatgaagaaggctataccgataccgtatcttccgtaagcatcaatttatacggtttcgtaaacggtgtgaaggactgtctgaagcaggcggccggagaaggcaaaacacaggctggctggaacgacggatcttactcttatgaagcaccggagtttgacagcaatggatacaaggaccaggtgtccatgactgtaaaaggcggcaggattacggcgcttacctgggactgcgtggataaggacggcaaactgaagagcaatctgtccatgaacggcgagtatgtgatgacggaggatggaccgaagtggcatgagcaggcggatgccgtagtgaagtacgtgctggcgaaccagtctctggacggcctgatcaacgcggatggctataccgacacggtagcctccgtaagcattaacttatacggttttgtgaacggtgtgaaggactgtctgaagcaggcggccggagaagccaaagcacaggccggctggaatgacggatcttattcttatgaagcgccggaatttgacagcaatggatacaaagatcaggtagccatgaccattgagggcggcaggattacggcacttacctgggactgtgtggataaggacggcaaactgaagagcaacctgtccatgaacggcgagtatgtgatgacggaggatggaccgaagtggcacgagcaggcagaagccgtagtgaaatacgtgctggaaaaccagtctctcgatcacttgatcgacgcggatggctataccgacacggtggcgtctgtaagcattaacttatatggatttgtaaatggagtgaaggactgtctgcgtcaggcgtctgaggggaccgcggctaagagcagctggagcgacggaaccttttcctatgaggctccggaattcgacagcaatggatacaaggatcaggtttccatgactgtgaaagacggaaagatgacggctctcacctgggactgtgtggataaggaaggaaagaaaaagagcaacctttccatggatggcgagtatgtgatgacggaagacggcccgaagtggcatgaacaggcggatgccgtagtaaaatacgtgctggagaaccagtctctcgacggcctgatcaatgaggacggctatacggataccgtggcttccgtgagcatcaatttatacggctttgtcggcggcgtggaggactgtctccgccagtcgtcagaaggcagtgccacggcggcttccgcaagtgcggtgaaggacggaagctactcctacgagtctccggaatttgacggcaatggctataaggatcaggtttccatgacgatcaaagatggtaagatcacagcgctcacctgggactgcgtcgataaagacggaaagaaaaagagcaatctgtccatgaacggcgagtatgtgatgacagaggacggcccgaagtggcatgagcaggcggagtctgtggtagcctatgttctggagaaccagtctctggacggtctgatcaatgaggatggctatacggatgccatagcctccgtaagcatcaatttatacggatttacaggcggtgtggaagactgtttgaagcaggcttccagataagcagtaaggattgatgaaatttaaaacaattgccggacttttcgaagtctggcaattgtattttatacaggaagtatggtaagatggtaggcggtagaaacagatacggcgcgtaagcggtataagacggctgcttacgtgcttggaagcaggaggtaagatgatgacaggaaagacggagcaaagccccgctcataagacggcgctctacggcatgctgattgcactcgcttttgtactgagctttgtcgagacgctgatccccatttcccttggggttccgggcgtaaagctgggacttgccaatctggtgacggtcgtgggcctctacacagttggaatttacggaaccgtagccgtttccatgatcaggatcgtgctggtggcgtttacctttggaaatgtctttagtatgctgtacagcctcggcggctgggggctgagtattcttttgatgatcctgtgtaagaagcgggagtggttcagctcagtgggaatcagcgtcatcggcggagtgggccacaatatcggccagctctgcgtggcagctctggtggtgaaacaggcgggggtatttatttatttgcctgtgctcctgattgcgggaacggcagccggtcttgtgattggcttcgtcggagggatgattgtggaacgccttccgcgctttataaaaaaattataggaaaaacaaaggatatcgtattgttttacgtgttccctcaagttataatagagggaacacagtcatgaagaaaacaggagggattgggatgatttatgaggcaataaagaaactggtgcagtacggaatggatacagggctgattactgaggtcgacaggatctatgccacgaaccagattcttgacgtgatgcggatggacgagtatgaggaaccggagggtgagttaagtgagaccgacttggaatccgttttaaaggaattgctggattatgcccatgagacaggcgttctgccggaggacagcattacataccgggatttatttgatacaaaactgatgaactgcctgatgccgagacctggtgagatcgagaagaaattctgggacatctataacggggaatctccggaggcagccacggattattattataaactgagtcaggattccgattacatcagacggtaccgcatcaaaaaggatatgagatgggtgacggccacgaagtatggcgatcttgacattaccgtcaacttatccaagcctgagaaggatccgaaagccattgcggcggcaaagctggcgaagcagagcggttatcccaagtgtcagctctgtatggagaacgagggctatgccgggagaacgaatcatcccgcccggaacaaccacaggatcattcgtctgaaaattaacgacagtagatggggctttcagtactccccttacgtttactataacgaacactgcattgtgtttaacggccagcatattccgatgaagattgagaaggacacctttgtcaagctgtttgatttcgtcaaactgttccctcactacttcctgggctccaacgcggatctcccgattgtgggcggttccatcctgtcccatgaccatttccagggcggcaattatacctttgccatggcgaaggcgccgattgagaagtattacgagatggaggatttcccgggcgtggaagccggaattgtgaaatggccgatggctgtcttaagaacccgcagcaaaaatccggatgacttaatccggctgggagaccgggttctgcaggcgtggagaggctatacggacgaggaggcatttatttacgcggagaccggcggggaaccgcataacacaatcacccccatcgccaggaaaaagggcgatatgtacgaactggacctggtgctccggaacaatattacgacggaagagtatccgctgggcgtttaccatccgcatcaggagcttcaccatatcaagaaggagaatatcggtttaatcgaggttatgggactggcggtccttccttccagactgaaggatgagctgagccttctggccgggtatattctggaaaagaaggatatccgcagcaatgaaatgatcgaaaaacatgcggactgggtggaggaattcctgccaaattatccggagatcacgaaggaaaccatcgacgagattcttcagaaggaagtaggccttgtattcgagcgcgtccttgaggatgcgggcgtctataagtgtgacgagaagggaagagccgcgtttgggcgtttccttcacagtacaggctttgtggaagcctgaagtgatataaactgacttttgcaggctgatccggccacagacatactgttgtggccgggtcagcctgtttggtgtttgtaattgtaatctgattgcgctatattctattgggaatgagaggtatgcctctcatttactagcgtgataaaagggggaccggctggaagaaaaggccggggatgacagacaaagtcatgaaacagattgaaaacaaaacactcagaacactggcggagtatgggatcataacaggaagtatctggattatggtcatcggaatttatttcttcaaattcccgaataattttgctttcggaggtgtcacgggttttgccacggtagtaagtgcggtgactcactggtcggcaagtcagtttacgacgattgtcaatatggcgcttttagtggccggttttatttttttagggcgcggatttggcgtgaagacggtttacgccagcatcctgatgtcatttaccctctcatttttagaacggatgtgcccgatggtccgcccgctgaccagagagcctctgctggaactgatctttgcgattctgcttccgggagtcggctcggcgctcctgtttcatatcggcgcctccagcggcggaaccgatatcgtggcgatgattctgaaaaagtatacgagctgcaacattggcacggtgctgcttgttgtggatatggctgcagtgattatggcgttctttgtattcggaccggagacgggattgttttcctccctcggacttatggcaaaatcactggtcattgacgatgtgatcgagaatatcaatctttgtaaatgcttcagcatcatttgtgacgatccggggccgatctgcgactatataattaatggtctgaaccggagcgcgacggtgtatgaggcgcagggagcatttacccatcaccggaagaccgtggttctgaccaccatgaagcggtcccaggcattaaaactcagaaactatatcaggcgagtggaacccagcgcctttattctgatttccaattccagcgagattataggaaacggatttctggccgggtaaaaagtgataaaaccatttctctgttttcggcatttttaacaaaaatacactttaatgcgttaaacacacataaaattaatgcgatgaaattgacggggcggattttttgtagtatgataccaattaagttcagatcgaacgagatttgtgaagaagaggagagaatggttatgaaaaaaacagcaaaagcggcatcacttatcctggtaggagccatgatgatgtccttaacggcatgcggcagcaagccggcagagacaacgaaggcgcctgagacaacgacagcagaagcggcttcctccgcggctgacacggaggcagaagagacaactgcggaagcggctaagacggatgatggaaagcagtttaagatcggcgtacttcagctggtacagcactccgcactggatgcggcaaacaagggatttatccaggcgcttgatgacgccggaattaactatacggtggatcagcagaacgcctctggcgatcagccgacctgtcagaccatcgccagcaagctggtgaatgacggcgacgatctgattcttgcgattgcgactccggctgcacaggctgttgccggtgcgacgacggatattccggttctgattactgcggtaacggatcctgcggaatctgatctggttgcaagcaacgacgttcccggcggtaatgtcagcggtacttctgacttaactccggtaaaggagcagatcgatttattaaagcagattcttccggatgcgcagacggttggcgtcctttactgttcagcggaatccaactctgagatccaggccaagatggccagagaagcgatcgaagcgaagggaatgaaagcggttgactacacggtttcgaattccaacgagcttcagacggttgttacttccatggtaggtaatgtggatgcgatctacgctccgacagacaacaccattgcagctggcatggcgactgtcggcatggtagcgattgataacggaattccggttatctgcggggaagaaggcatggtggacgccggcggattggctacatatggaattgactacttccagctgggatacttgaccggccagcaggcagtcagagttctgacagagggagctgatatctctcagatgccgatcgaatatctgccggcagataagtgcaatctgactgtcaacgaagatacggcggcggcgcttaacatcgacgtatccggtctcaaataagagaatatttttaagcaggcagatgccagcggcggcaggcatctgtctgtttctacataaatgctttacataaagaatgcgggagtgtattctttatgtaaggcatttatgagcgttatcatgagcgcttaagactgattatgccggaaagataaagatgcggaggaatggttgaatgaacggtttactggtatcccttcaggacgcggtagtgcagggagttttatggggaattatggtactgggggtttacattacttacaagcttttggatatcgccgatttaacggtggatggaagctttgccctgggcggctgtgtctgtgccgttatggtgttaaacaaaggggtggatccctggatcgccctgattatagcggcagcagccggtatggcggcaggagcggtgacgggattcttacatacggtgtttgagatacctgcgatccttgcaggaattctgacgcagatcgggctgtggtccatcaatctgcggatcatgggcggcaagagcaatgtgccgttgttaaagaccgatacgatcttctccaaaattataggctggacaggaatcaacaagcagcttgcgtcccttttgctgggaattggagtcgctgtattgatgatcgcttttctgtactggttctttggtacggagatcggaagcgccatgcgggctaccggtaataatgaagcgatgatccgggcccagggggtgaacacgaactggaccaagctgctggcgctgaccatcagcaacggcctcgtaggcttatccggcgctcttgtatgccagagccagaagtatgcggacatcggcatgggaaccggcgcgatcgtgatcggtctggccgccattgtcatcggtgatgtattgatgggacggcttcgttcctttggcagcaagctgacctcggctgtcgtaggttctgtcatttactttgtaatccgcgcagtggtactgagaatgggcatgaatgccaacgatatgaagctgctttccgcagtgatcgttgcagttgctctctgtgttcctgtcgtggtaagaaaatggcgtcttaaaaaagcttacacggaaggaggagaataagcatgctggaaattaaaaatgtccgaaagactttcaacaagaatacaatcaatgagaaaaaagcgttaaacggaattaacctgcatctggatgagggggattttgtaacggttatcggcggcaacggtgctggaaaatccacgatgctcaacatgattgcaggtgtctatcccatcgattccggaaagatcgagatcgacggagtcaatatttccagggaaccggaatataaacgtgcccgctacatcggcagagtcttccaggaccctatgatgggcacggctgcggggatggagattcaggaaaatatggctctcgcattccggcgcggccagaggcgcggtctgggctgggggatcaaggccaatgaaaaggacttctaccacgatgcattgatgaagctgggtctggggctgcagacccgtatgacgaataaggtgggccttttatccggcggccagaggcaggcgctgacgctcctgatggcgacgcttcagaaaccgaagctgcttcttctggatgaacataccgcggcactggatccgaagacggctaaaaaggtactggagatcacgcaggagatcgtggaggagcagaacttaacgaccttaatgattacacacaacatgaaagatgccatctccattggtaaccgccttgtcatgatgcatgaaggcaggattatctatgacgtgtccggagacgaaaagaaaaagctggaggtagatgacctcttaaagaaattcgaagaagcaagcggtgaggagtttgccaacgaccgtatgattctggcgaagtagcagctatcagtgtggctgccaaaatgaggcggcaggaattgaccggaacagtccggctggattctgccgcttttttgctgctgcggtgcaagtgggacactgccgctgtaaatgcggttctgcaccgggtacatctgattatgttacataattgttacataatcttaataattatttattctttctatatcgcaattaccgacaaattatgctatacttatgcggataggctcgtagtctgacttgacagttttaaaagccaaaaacgatgatggagtgaatattacagaatggaaaacaaaagcgataaaagtgaaaaaaaagattacgttgttcgtttgaacaaagccagaaaaaaacgtaataagaatgattacgaaagatatctcattctggcggcgattgcgatcgtggtggtggtaatcatcatatttgccgggaaggccatagcgaagcgcgtctcggcaggggcggaaaagactgcagcgacagaagagacaggaagtcagggggaagagtctgaccagctgacgattgatgccaaggaagcagaggagtctgaggccgaagcacaggcaaagaagacagaggaagaaaaaaaggccgtcgtcgattcttaccagaatcttggaattgtgcaggtgtccggatatctgaatgtgagaaaagaaccgaacacatcggcggacatcgtgggcaagctgatgggagacagtgcctgcgaaattttagacagtacccaggagggatggtacaagatctcctccggcggtatcgaaggatacattgattcccagtatgtcctgacaggtgacgaagcgaagacgaaggcttatgaccttgtttcactgcgcgcgatcgtgcaggtagataatttaaatatcagaaaagaggccaataccacatcagatgttgtgggtcaggggctgttaaacgagcggtatgaggtgatcgatcagttggatggctgggtacagattccctccggttatatgtcggctgattacgtgaagctggagtatgcgttaaatgaggccagaaaactggatttgaaggccatgatttttaacatgtacaaaaacataggaatttcggatgtggacaactatctcaacgtgagagaagagcccagcgagaatggcaagattatcgccaagatgcccagcaaggcggccggcaatattcttgagactacggacaacggctggtacaagatccagtccggcaagatcaccggttacgtaaaatcggattacattttgactggtcagccggcgaaggatgaggcgctgaaggttgcagaactgatggcgattgtgaacacggatatgctgaatgcccgttccgaaccgtctacggattctaagatatggacccagatttccaataatgagaaatatccggtgttaaagcagattgacggctgggtggagattgagctggaggaggacagcaacgcttacgttgcttctgattacgtggatgttcgatatgcgcttcctgaagcaattaagttttcaccgctggaggaaaaggcgaatgctgccgcttctctcagaacccagattgttaattatgctctccagtttttgggaaatccctacgtatggggcggcaccagcttaacaaaaggagcagactgttctggatttaccctttccgtattcggccattttggaatcagccttccccattattcaggatcacaggcgaatatgggaaaagcagtgaaatccagtgagatgcggccgggcgatctggtgttctatgcaaacagtaaaggtactatcaatcatgttggaatctacatcggaaatggacagattgttaatgcggccagccgaagaagcggcatcaagatctctacctggaattacagaactcctgtgagaatcaggaatatactcggagattaaactgcaattaaagttttaaaacaagaggaaaaaatctggacatataccgctgaacgtagtataatatacctgcaaagaagataacctggactggaggcgattacatgtcagatgaaatgatgttaattttggaaaaactggaaaccatgaatcacagccttgcgggaattgaaggtaaggtggacaatactcatgaacaccttttaagactggaagagagcacgaatgagcgtttcatgaagatggaagatcgttttgtgggattggaagatcgttttgcgggattggaagatcgctttgtgggattggaagatcgttttgtaggattggaagatcgctttgtgggattagaagatcgttttgcaggattggaaggccgtttcgtaggattggaagatcgctttgtgggattggaaggccgtttcgtaggattggaagatcgctttgtgggattggaaggccgtttcgtgggattagaagatcgttttacacagtcagaagcagcaacagatctgcgttttaaccgtgtagaacagacgttggaatcaatggggctgatgctggagaacgaaataagtaaaaaaattgatgctaatggcgaaggtcacgattatctgaaacgaaatctggatgacgcgctcagggttgagaaggataaggagtggatggagcttaatatcttgaatcttagaatggatgtcaggaaaatcaaagacaaacttgctatggcttagcagacagatgttgtccggaatacaaaataaaaggggctgtgaaaaaagtcctctaaagtaaaaaagaacgctttcagatatgaaacctggaggtgttcttctttttgtggtaaaattaagctactatgaataataataccgaaaaatattataacaaatagataagtatcttaagccagaatccttacacaagatgggacggccaggatataatcgagtcagcatacgaaagacgatcctgttcggctttatggacacaggatacgtttccctgtgggaattagaagaccggtgcaaagttaaccttcgttatatgtatcttgatggatcagaagacacaaaatggaagggctgtgaaaaaatggaattagatcaactccattttttcacagcccctatatcttctttattggtggcggtttctgttatagttaatcagacaaccggcttttacaatctctttttcctcatccgtcatctcggctatgtgaaggttgatctcgtggatgggattgccttcctcatttttgatgacataagcaggaatgtgctgcatgtcgccctctaaggctttccgtacacctggaatatagatgaaatcaccgatctcaaaggaaggctcttcatctaacaggaacggaagcatgccccagttgatgacattggagcggtaacgcttggtagcgtattcgtttgcgatattggcaagaccgccgagaactctctggcagctggcagcctgctcgcgcgcggaaccgtcgcctggtttgactgcgtagatcatactgccgatctccgtctctctggctctcaattcgggctggtctaagtaaatgcgaagcgctttgaatgcggcttccatctctggatccggttttaacgggcatgcgccggttttgcggatttcttccagctcattgacctttttggaacgtccgacatactccggatcacgtctggaaagcgtaaattctgccagacccagcggattggagcgataggaggaggtttcaccggaaggaatcagttcatccgttgtggtgacagggtccatgatcttggagcagactctcaggataatattatcggttagagcgctcatggacggccagtctttgatattcgggccatagatcagctccgcatccgggtcggcctttccatatccctggtaaactcttctctcataggaagtgctgtcaaattcgtaagccggtacttcataatcgtcgacaattgcctcagcagatgtgaggataccgccgtttgcagcggtggcagcgatcgagcgggcatccatcagggcaacactggaaatctggccattacccggcttggaaccttcacggttcgggaagttccttgtggtgtggcgaatactcagcgtgttgtttgccggtgtgtcgccggcgccgaagcacggtccgcagaatgctgtccggatggtagcaccggccgccatcagttctgtaacagctcctttcttcaccagatccatatataccggctgtgaggacggatatacagacagattaaagatatcgtttccgcagtttctgccggacaggatatgagcagcggtcataacattggaataattaccgccggcacagcctgcgatgacaccctgctggaccaggagctttccgtccacgatcttatccgtcagggacagatggatattcggattgcccaggatatggtctgcttccttttctacggttcttaaaatatcgtccaggtttgcattcagttcgtcgatctcgtaggtgttgctcggatggaacggaagagcgatcatcggcttaacggtgcttaaatcgatggatacgacgccgtcataataggcgatatccgccgggttcagctctttgtaagcctcctctctgccgtgcagctttaagtagtccctcgtgtcctcgtctgttttccagatggaggagagacatgtggtctctgtagtcatgacatcgactccgttccgataatcagtatccatggaggcgattccagggcctacgaattccataactttatttttcacgtagccgtttttaaatacggcgcctactatggcgagcgccacgtcatgaggccccacgcccggacgcggttttcccgtcagataaatcgctacgacgccgggataggtgacgtcatatgtatcgcgaagcagctgcttcaccagctcgccgccgccttcgcctaccgccatggtaccgagggctccgtaacgggtatggctgtcggaaccgagaatcatgcgaccgcagcccgccatcatttcacgcatatactggtgaataaccgcgatgtggggcggcacgaaaatcccgccatatttttttgcagctgacagtccgaaaatgtggtcgtcttcattgatggtaccgcctaccgcacacagggagttgtggcagttcgtcatgacatagggaatcggaaactcggtgagacctgacgcccttgccgtctgaatgatcccgacgaatgtaatgtcatgggaggccatggagtcgaagcgcagctttaaatgctccatattgtccgcagtgttatgttccttcaggatggaataggcaatcgtgccctttttcgcctcttcttttgttatgttctttcctgtcagagcgacaagcttttccgcttcctgttccggaaccagttcggtaccgtgaatcaggaaagcgccgccatcatacaattttaccatatgctatctttcctctctcttcttgtagggtgttgcttcaccaacgtatttgaacgccggacgcatgatttttccatcatacattttgttttcgatattgtgcgctagccagcctgccatacgtgcgcagacgaagagcggcgtgtacatatcttccggtatctgtaacatattataagcgaatccgctgtagaagtccacattgtttgagagagtttttccgtttccggcgagagtttctttggcgactttttcaaatcttgtcaggaattcatattcatcctcacgttttttctgctttgccagcttctcgcagcaggtttttaataagtctgcacgcggatcggaaaccgtgtagacggcatggccgagcccgtatacgagaccggtatgatcatagaagtctttgtcgagaattctcttgattacctgcttgatctgtgcgtcggaggcctttaaaccgatttctttttcaatggcggagatcatttcactgcaacggatattggcaccgccgtgtttcggtccttttaaggatccgatggatgcggagatcgaagagtagatatcggttccggtggaggaaatgacgacatttgtaaaggtggagttgtttccgccgccgtggtctgcgtgaatcatcagcatgacgtcgagaagatcagcctcctgctcggtgaagacgccgtcgcggcgaagcatgtagaggatgttctcggcaatggagtattcttccttcggatagtggataatcaggctttcccggtcgtaatagtgaatcttgctctgataggcgtaagcggccatggagggaagttttgccagaatgcttactccctttaacagtgtctggtaaggatcgacgttgtcggggtcctcatcgtaattatagagagaaaggatactctgctgcagactgttcatcaaattgcgggagggggaacgaagcagattcttctccagaaactcatcgggaagcggatagaagtggcgaagaattccggcaaattcattcagctcctttttcgaagggaggtatccgaataacagaaggaatgcggtttcttcaaatccgtaccgcgcgtttccttttcccttcaccagatcgccgatttcaataccgcggtagaaaagctttccgggtacattgaccttttttccatcctgaatctcgtagccgacaacgtcggatacacgcgtcaagccgaccctgactccggtgccgtcctcgttgcggagacctttttttacgttgtgttccttgaataagtaatttggaatatccgtatagtttgaggatttaccaaatgtctgtgcgatgaagaagttgttcatgcgatattctctccttttcctgtcgattcagtcacagtctgcataattttacagaaaagcagcgcgaagtgatctccacgctgccttccttggcatgactgaagtgaccgtttttatattgttcagtagtttaccatggaaaagtatcaaagtcaataccttgttataatcacaactaaaatattgtgattataacaaggtatgtttgtattaaccatacaaatgtgtgtgttaggcggccttaatttttagaaataaaaatgaatcaataatattaaggaaaaagaaaggaaaagattctgacaacatactataataaaaagaaaaagagtggtaacagccacagggaaagggagcggcgccatgtacagtgattttggcttttacggaggatttacgcagttatttccgatattattcggagttatatttttgattgcggcagtaatgattgtagttactctgattcgggggatttcacagtggaattccaataaccactctccggtgctgactgtggaagcgatggtgacatcgaagcgtcaggaggtttcacatcggcacagcaatcaggacacgatggatacttatacaaattttacgtcttattatgcaacgtttcaggtggagagcggagaccgcatggaactgggcgtgtcaggaacagagtatgggatgctggcagaaggagatatgggcaggctgacctttcagggaacgaggtatctcagctttgagaggggacctttagagtcatagagagggatttattcccgctggcggcgggttctttgacttaggagaatgatcggactcacgccagagcgggcaggaggatgagagatggaaaaacgtaaaagaacaatcagaaaattaatgccggtcagtccttacgacagcgccggactggaggtctggttttcggaactggccggccagggactgtttgtcaggaagaccgggtattattttgcaaattttcaaagggaagaggcgagaagtctggtctataagctggagccctgtgaccagtaccgggacgagcatgaaaaggagttgacggggcagtaccgtctggcaggatgggaagcggccggtgatgtatggcggaagtttttgatattttcggctgtcagggacggggctgtaagtccggagatttccgttgaaatacgaagggcaggcgagtcatccctaaagaaaacggggcatggctgccttttgacgtgcgctgcggatgccgtactgacggctctctggtgctggatgatcctgggccgatttggtttctggtatacgactaccatggcgacgcctttccttctctgcgccttaatggtctttatattcggaataaatatcttctggagaatgtccgattacatacagatccggagatatttaaaggggacaacatgtggcgtacatctgccggaaagcaattgtcaaacacgccctggcagaggacgggccagatcgatctgttcagcagccgcggtcacctgcatctgcctcgtgtttatatgggcgggagagcagaaatcctggcataaggaactgagtgaggttgataccagtcttccggttccgcccattacggcgttttcgccggaaagcagccccataagaggaacggtcacctatcattcttccatcgtcgcaccggtacagtttcagatcgttcaggatggaccggatgcccagatgctccgtatggattatatggaactccgctttcccaggctggtgaagccggtctttaagagtatgatgaaggatcagctgaagtggagcagcgctgagccggaggcggtatcctccgggctgtttgacactgcctgtgtagctgtgataaacgacagcatgcattatctcttcgtctcggacggacagaaggtagcatcggtgtgctatatcggccccggttatacagatgagtttttagagacgcttcacgacgccatggagacatggacgcagccggagcttttttggcagtgatcagcgggtttccttcatattcctggaagccatccgtttcatggagcggatcgaaaggatacatattaatatagtaagaacatcggccgcgtgctgggcaaaacctgaagggagggaaaaccatggcaccagtgatcagaatgaatgcagcggctctgtgcagagtttcatgacaggcgaatctggcacagagcgtaaaaaggaattataagcggcaggaataccgcttgattttataaaacagatgtcgcctgagtggattctgcacttataaatgagatgagtgacctttatttaatttataaggagagaatctatgaaagacagacaataccgtaactttatcattttctggttcagccagtccgtatcccagctggggagttccatgacttcctttgccttaatcatctggtcttacagcagaaccggttctgccatgtccgtgtcgcttatgacattttgtacatggcttccctatattgcggccagcatcgttgccgggccggtaatcgaccgttaccataagaaaacgatcatgcttctcgcggaccttcttgcggcgctctgctctctgaccgtagcggcgctcgcggtctccgggaatctggcggtctggcacatttttatcgtcaatggaatcaccggctttatgaacgcatttcagtttccggcggagacggtggcggtggggatgctggttccgaaggaaaagtacagccaggccagcggcttaaattcctttacctcctccttactcactgtggtgaccccggtgatggccgcgtctttatcctcatttgcagggataaagggtgtcattgcctttgatctggcgacctttttgtttgccttttctgtcctgctgtttcggattaagataccggagaacgcgggagggacggagacagggaaaaagaaagagaaagagaagatctcggttcaggaatcgtggagggaggggcttcaatttcttcgcggacacaaacagctctggtatctgatgatcagcatggcgcttatgaactttttttcacggctgacctatgaaaatattctttctcccatgatactggcgcggagcggccagaaccagatcgcgctcggcattgtcagtgggattctggggatcggaggcatggcgggaggtctgatcgtctccttcgtaaagcttccaaaggacagcgtccgggtgatctttttatcgggaggcatctcctttttgctgggtgattttctgatgggagcaggacagaatgttctcgtatggagcattgccggcatagcggccagcctccccattccttttattatggcggggcagaatgtgattctctaccggacgattccgcagaatatgcaggggcgtatctttgctgtgcgaaatgccatccagtactggacgattccgaccgggattctcctgggaggttttctggcggactacgtgtttgaaccgtttatgtgcgcagacgggggcattcagacggttcttcaccggctgaccgggtatggagccggctccgggatggcggtaatgtttctctgtaccggcattctcggaagtttgagctgtttcttctgttataaaaaaatgaaaaagaatggataaaagaagcacaggaagaggagcgcaatgatgcggtcagcttcctgtgcttctttttgtgcaggtacaaagcataaaataatggtttctttcacatcataagaaaacgactaaaatacgattatagaaaatacagtcatgcaggaggaaatcagaatgagagaatataaaaaagacagtgaaatgaactgcgatgcggataacagaacagaaaaccagaatggaaacggcagatcagacgagaacaacacctcttccggagatacgagaaaagaccgtctcgatgagaagaagacggagaaggacatcgagcagaaagaggatgaaaagctggaagaatacggtcagatgactctggatgacaattcaaaaaagagaaaaattcatttgctctccatcatcggggaagtggagggacacgagaacctgtcgggaaacagcaagacgacgaaatacgaccatatccttccaaagctggcagaaatcgaggatgatgattccgtggaaggtctcctggtgatactcaatacctcgggcggtgacgtggacgccggtctggcgattgcggagatgatcgcttctttaagtatccccaccgtgtccctcgtactgggcggcagccattcgattggcgtcccgctggcagtcagcacggactactcctttatcgtgcctaccggaaccatgatggttcatccggtccgtatgacaggcatggtcatcggcgcttctcagacgtacgaatattttgagatgattcaggaccggatcttaagctttgtctcgggccacgcgacgatcgcttacgaccagttaaagcgcctgatgttaaacacggagatgctgacaagggacttgggaaccgtgctggtaggcgaggaaacggtgaaagaggggctgatcgacgaggtgggcggaattaaggacgctctcagaaaattgtatgagatgatggatgaagtgaaaggttagccgttgcaattctcccgatttttttgtatactgttaccaatggataaaagggggaagtattgtgcctgagacaacaaagaagaagacaacatcgaagacgacagcaaaaaaaggtactaacgggaaggtcggaagaccgaaaaatacgacaggcaggcggaaagcggcggaaccagaaccagaatttatccggtcagaagttatcatcatcatatcatttgcggctgcggccattctttttttgagcaatttccatctgtgcggagtggtaggtgatttccttcgcagtctgcagcttgggatattcggaggaatcggatatgtggcgccggttctgatgtttgccggaacatgtttttatatctccaaccggggcaatcccagagcaacttttaagctggcagcggtgattctggcgttaatctctctctgcggattctgcgagctcctgtttgggacgaggctgggagccggcgggaagctgatggatatctatgtgacggcggcggccagcggtaagggcggcggcctgatcggcggccttctggccgaaggactgatctccattatcggaaccgtgggcgcctatctcgtgattttggtgcttatcattatctccgcggtatgcattacggagaaatcttttgtgaacctgataaagagcggcagcggaaaggcttaccaccatgccagggaaaacatggacatccagagggagatccatgcggaacgcagggaagaacggcggagaatccgcgaggagcagaagctgcggggcgtcaatttagacgtgaccaagctggaggcgccggaagcgtatgagatggaagatgaggcagtaaacagcgcggaagcggaggacgacatcgatgttcacgcaggacgtcttgccgctgtatccgccgtggaagtgccggagagtgcgaaacaggcggttccggaggtgcagccgaatccggcggatattttccgcggcagtattttcccgaagccgggcgaggaggaagatctgcctcgtgtttactctgccagtgaggatgatgttccgtttgatgccgatgatgccgttccgttcgtgacggaagagttatgggagagttcccctgacctgcgttcggcggaatgtgacgcaggagggttcgcagagtctgatgattacggaacttcagggacgctttttgttaaaaaagagatgaagacgctggaagagatggaagtcgcccgggaagagctctatccgactgacgaggacgacagaggcgttaactacagtgataccttctccataccggaggaaccgaagcgtgtcgttaccgcttccggcaaggtgattgagaccgatacggaagcgcttcagaagaaactggaaaagaagaaagctgagaaggcggagaaagagcaggccggagaactcagtgtgagccaggagatcaaacagaaggaggaagtggtgaagaaggagtatgtttttcctcctgtcacgcttcttaagaaaggtaagaattccggtccgttttcggataaggaataccgggagaccgccattaagctgcagcagacactgcagaattttggtgtgggcgtaactgtgaccaacatcagctgcggcccctctgtgacacggtatgagcttcatccggagcagggcgtaaaggtgagccggatcgtgggactggccgatgatatcaagctcagtctggcggccgcggatatccgtatcgaggctccgattccgggtaaatcggcagtcggcatcgaagtgccgaacaaagaaaacaacatggtatacttaagggatattctggaggcggacgagtttcagaagcatgcatccagaatcgcttttgcggtgggcaaggatatcggcggccaggtagtggtaaccgatatcggaaagatgccgcatttactgatcgcgggtgcaaccggttccggtaaatccgtctgtattaataccctgatcatgagtattatctacaaggcgaatccggatgacgtcaagctgatcatggtggatccgaaggtggtggagttaagtgtctataacggaattccgcatcttctgcttcctgtggtcacagatccgaagaaggcgtcaggcgcgcttaactgggcggtggccgagatggatgaccgctataagaaatttgcccagtataatgtcagggatttaaagggatataatgcgaaggttgagaatattaaagatatagaggatgaaaacaaaccgaagaagatgccgcagatcatcatcattattgacgagcttgcggatctgatgatggtggcgccgggcgaggtggaggattctgtctgccgtctggcccagcttgcgcgtgctgcggggattcatctggtcattgcaacccagcgtccgtcggtcaatgttattacgggcttaatcaaggccaatgtaccttcgagaattgcatttgccgtttcttccggtgtggattccagaaccattatcgatatgaacggagcggagaagcttcttggaaagggcgatatgctgttctatccatccggctgtccgaagcctgtgcgggtgcagggcgcctttgtatcggatacggaggtttccgctgttgtggatttcttaacggaacagggaatgacagccaattataatcctgaggtggagaatcagattgtccagacaccggcggcaggcgatgcaaagggcggtggaaacgaccgggatgaatatttcgtccaggcaggcaaatttattatcgaaaaggataaggcctccatcggaatgcttcagagaatgtttaagattgggttcaacagggcggcccgcattatggatcagctggcggaggccggcgtggtcggcgaagaagagggcacaaagccaagaaaagtgctgatgagcgcggaagaatttgaggaattgctggaacagggttattaattacatagaaggaggaatattcacagatgaaaacagatattgagattgcgcaggaggcaaagatgattccgattaaggaggtagcggcttcttatggaatcagcgaagatgatctggaactctacgggaagtataaggccaaactgaccgatgaactctgggaagaggtgaatgacagaccggacggaaagctggttctggttacggccatcaatccgactccggccggagaagggaagaccacgacgaccgtcggtctgggagaggcgtttggcaggatggacaaaaaagccatcatcgcgctcagggaaccgtctttaggcccctgcttcgggatcaagggcggtgccgcaggcggcggatatgcccaggttgtaccgatggaggacttaaatcttcattttaccggagattttcatgctatcacctcagccaacaatttactggcagcgcttctggacaatcacatccatcagggcaacgcgctgggaatcgatacgcgtcagattctgtggaaacgatgcctcgacatgaatgaccgcgccttaagaaacgtggtggtgggtctgggtgccaaagcagacggatttgtgagagaagaccactttgtcataactgtggcctccgagatcatggcgatcttatgtctggccgatgatatgaatgatttaaaagaacggttaggaagaattattgttgcatataactatgcaggagagccagtgacggccgcccagttaaatgcggttggcgccatggccgccctgttaaaggacgccatgaagccgaatctgatccagacgctggaacacacgggagcgattgttcacggcgggccatttgccaatattgcccatggctgcaacagcgtgcgcgccacgaagacagccttaaagctggccgatatcgtcgtgacggaggcgggcttcggcgctgatttgggcgctgagaaattcctggacatcaaatgccgtatggcgggcttaaagccggatgccatcgttctggtggctacggtcagggctcttaaatataatggcggaattccgaaggatcagctgaaggaagagaatttagaggctctggcaaaaggaatcgtaaacctggagaaacacatcgaaaacatgcagaagtacgatgttccggttatcgtaaccctcaattccttcatcacggacaccgaggcggaataccagtttgtaaagaagttctgcgaggacagaggctgtgagtttgcactctccgaggtatgggaaaaaggaggggagggcggtactgctcttgcggaaaaggtgctctatacactggaaaacaaggagagccgctacaaaccgctgtatccggatgaagccggattaaaggaaaagattgcggccgttgcaaaagaaatctacggagcggacggcgtatcctatgcaccggcagcttcgaaggcgttaaaaaagattgaagacatgggattcggcagccttcctgtctgtatggcaaagacccagtattccctgtcggatgatcagacaaaactgggccgtccaagcggtttccagatcaacgtgagagacgcctatgtatcggcaggcgccggtttcgtggtagtgctgaccggagcgatcatgaccatgccgggtcttccgaaggttccggcggctaataatattgacgtaaataacgacggagtaatcaccggattattctgatggaggttttcatgaaattcagagagtggcttgaagagctggaatatgacgtaatttccgggaatttggacatcgaagtggaggatgtcatctatgattccaggaaagccagggagaatgtggtgttcgtgtgcacaaaggggacgaagatcgattcccacgaatttattccggatgtggtgaaggccggggtgaaggccctggtggtggaacgccaggcagagattcctgacggtgtaaccgccatccgtgtacatagttccagggaggcgctggcacttctgtctgccgcccggtttggccggccgcaggagaagatgattaccataggggtaacaggaacgaaggggaagacgacgacgacccatatgataaaggcgattctggagagctgcggtaaaaaggtggggatgatcggcactaccggtattgtgatcggcagtgaggtgacgcctaccatgaacacgacaccggaatcgtaccagctttttgagagctttgagcgcatggtgcaggccggatgcgaatacatggtgatggaggtatcctcccaggcgttcaagatgcaccgtgtcgacggcatccgcttcgattacggcctttttaccaatatttctccggatcatatcgggccggatgagcatgcggattttgcggaatacttatattataaatcccagctcttaagccgctgcaggatcggaatcgtgaatcgtgacgatgagcattaccgcgagatcataaaagataccgcctgtgaactggcctcctatagcctcgaacaagaggcggacttcatggcaggacagattcactacgtgagcgaacctgaatttgtgggacttgaattcgatgtgacagggcggtataagctggaagcccgggtgaatatacctggaaaatttaatgtatacaacgcgctggcggccatcagcgtatgcagctttttggaccttccgaaggagaaggtacgccatgcgctggagcatttaagcgtcaacgggcgtatggagatcgtgtattcatcgaagaaatgcacggtaatcgtggactacgcccacaatgcagtcagtatggaaagccttttgaagacactgcgtgagtatcacccgaaaagacttgtctgcgtgtttggatgcgggggaaaccgctcgaaggacagacggtattccatgggcgacagcgccgggagactggctgattttaccatattgacggccgacaattccagattcgagaagacaggggatatcattgcggatatccgttcctcgatcgaaaagacaggcggtgagttcattgagattccggaccggcgggaagcgatcgcctacagtatgatccacgccagacccggagacatgatagcggtcatcggcaagggacacgaggattatcaggaagtgaacggcgtccgccaccatttttccgaccgggaagtggtgctggagattgctgccgaactggaaaaaaatgaatagcgtgataagaaaaagatgccggaagtggtaatcccttccggcattcggctcgctgcccgcatgggtaaaaacatgcgcggctgctggattttaactacactctggcaggaggaaagacaggaagatggaacagatcacggttaaggaaattctggaggccacgggagggaggctgctctgcggcagcccggatacgccgctggaccatgtaagcattgattcccggacgatgaaggggaatgacttattcgttcccctggttggggaaaaggtggatgcccaccgctttatcgggcaggcgtttgataacggcgcggcggctacatttacgagtgaacacgacgtgatggaggataaccggccatggatccgtgtgtctgacacgaaacgggcgcttcaggctctgggcgcatggtaccggcggcgtttaaagctgccgctggttggaatcaccggaagcgtgggaaagacgacgacaagggagatggtggcctgtgccctgtctgccagataccgcgtctacaagacacccgccaatcacaacagccaggtcggcgttccgatcaccatgacggagatatccgggcaggatgagatcggtgtgatcgaactggggatgagcgaaccgggagagctgacggtcatcgccggcatagcccagattcagatggcggtcattaccaatatcggaattacccatattgaacagctggggtcccaggagaatatattcagagaaaagctttccatacaggatggcctgacggagcatggaattctgttcctgaacggagacgatgaactgctgaagaagacgacggcgagagacggttttgaaacgatctattatggaaccggagaaaactgccattaccgtgcggtcgatgtccgtctggagaatgggtatccggtatttacagcggtatgcggagacgaacaggtgccggtgcggctgaaggttatgggaacccataatgtggcaaacgccatggtatcgctggccgtagcctccgtctgcgggataccgatggaggcggccgcaaaacagctggcagaatttacaggctttcagaaccggcagcagatttaccatacaggcggaatgacaattattgatgatacctataatgccagtccggtatccatgaaggccggtctggaggtgttaaattccatagaacattccagacgccgggtagctgttctggcggatatgaaagagctgggacccgattccccgcggtaccactatgaaatcggcacctacattgcggcgcatccggttgataaggtagccgttctcggagaactggcaaaagagatcgcccgcggcgtgagggaacaggcgccccatattcttgtctatgagtttatggaccgggagcccttagtcgaatggctgaaaacggagctcagagaaggcgatgcggtgctctttaagggctctaacagcatggaactgggaaaagtggcagcggtatttctggaaaagtaaaagatgcagattaaatggaaaatacgaaaagcagatacggagatcagatatggacagagaagcagtgatcagaaacttttttcaggatgtgatcagtcagaatgaggtcgggttgggccggtggttcagagaagatgccgtgatccggtggcactgtaccaacgagcagttttctgctgaggaatatatccgggcgaactgtgaatatccgggccgctggaatggaaccatagaacgtgtggaacaggggaaggatactgcggtcactgccgccagagtctggtgtgaggaagccggtatttcaaaccatgtagtttccttttaccggtttgatggagatacaattgtgtctctggatgagtactggggagacgacggaccggcaccccaatggcgcctggagatgaagctgggccgtccgatcggtgagagaccgtgagagaggccggaagaatatgaaaagagtggtattttatgaaaaagcagatgacgaacttctccgttttgcggtaattgcggcaaaatatcagggacaatgggttctgtgcaggcataaggcgcgcagtacatgggaatttccgggcggccatcgggaaacgggagagacgattgaagctgcagcagtgcgggaactctacgaggaaacgggagcggcggaataccggatggctccggtcggcgtatattccgtgactgacgaggcagagccagaagagaagcggagcgaatcttttggaatgctgttttatgcggaaatcacccgttttgacccactgccttctgagtttgagatggaaaagacagggtattttgaaacgcctccggacaactggacctatccggagattcagccggtgtttcttaagcgtctgaaccaggaagaggcaaagcggagcagagagcagggcggtcattggggagcagaggcaccaaaagcgaggctgttctgcgggaatcagatgatctgtgcggaaaagacggcaggtctcctgtacagaagagcgggaatctgtgaccgtgagcttctgacccgtctgcggattcaggtattgcgtgcggccaacggtcttgatgaggacgcggatatgtcaagggcagaatcagagtcccgcagttattacgggacgtgtttcctggacgacagtcatgctgcatggctggtttttgacgacagggaagtggttggaacaggggcagtaagcttttaccgggtgatgcctgcgtaccacaatccttccggtaaaaaggcatatattatgaacatgtatacccgccctgattacaggcggaggggaatcgcgtaccgggtgctggagctgctgacggcggaagcggagatgagacatgtcgatgcggttacactggaagctaccgcggcgggacgaccgctgtatgaagccttcggatttactgcgatgcgagatgagatggagcttttgcgggaataaaaactgagacacggaaaggagaaatgaatatggggaaaatagccgtattgattgttgatgtacagaaagcgctggtggaggcacatccatacagagaagaggagtttttacaggaacttaagcgagtggcagacggggcacggaaggccggtgccgagattatctatgtccggcatgacggcgatgccggggacgagctggagagcggtacagaaggctggaacattcacggtgcggtggagccgaaaccgggagagcggatatttgataagaattacaacagtgcgtttctggagactgatctggaggagtatctaaaggaaaaacagatcaccgatctgatcctgatgggcatgcagacggaatactgcatggattccacctgcaaagctgcctttgaactgggatacggcgtggtgataccggaaggggccacgactacgtatgacaatgagtttatgtcaggagaagcgactgtgaaattttatgaaacgaagatttgggatggccgttttgccgatctgatgtctgtggaagaggtgcttgagctgctggcacgctgactgcgggaataaaaatgacaggatggaagaaaagatggaagaacagacacttgcagaactgctgtatgctgctgtatttcccgtaaaaaagcagggaaagggttgttcggaggagcggaagatctggaactccttcttagatcagctgaatcagggactggatgcatccggctgcggtgcgaaggcggaggcttacacggagtctgaaccctatgggcaggcctgtggatttcacagagactacggatactttatggtatcctgcggcgaccggggaactaagtccgtcacaattctggaggcagaggcggagactgcagtcaaccgttttctggcgttaatcatcgataaacaggcgtatcagtgggtactggacatcaaagaccgtgaggaggcctcgtggccgtatcactgtcggtacgattaccgccggctgtggttcggtaaggctctggagtggctggctccggctgtggactgggcatttttcgcgcagtgcgccgaccggtacatcggactgctgaaccgctggtttgcgcggccgcactgggaatacgactatcagatcagccggatcatcgagatcagcgattccagggagtattcggattcccattacttataccgcatagaaccggcaaaagagccaggacgttccaggatcaggctggagccgcagtttttggaagacggaggcgctgccgggaccttccagtttgacatagacggggaggcgctggatatgcggcggctggatgagaaagtccttgtccttatggaccgggaggaagacaacatagatgcctattcgctggaaggcagatttctgtggaatattggagaaaagctgccggttcaccgccgttacgataatctttatgaagatatcagcggctgagaagggaaacatgagattatgaagatactggttcttggaggtacacgttttttcggagttcatctggtgaatacactgcttctacaggggcatgaggttgccgtggctacccggggaaatgcaaaaccgcgttttattgccccggtggaagcaatccgggtggaccgcatccaggaggaatctatgcgcgccgtattttccggcagagaattcgatgtggtatatgatgatctggcctactgctccaatgatgtgaaaaatgcgcttgaaacagtccggtgcaggcgatatatcatggtatcctccatctcggtttatgaactgaaggaaaatacgagagagacggattatgatccgtaccgggaaactcttatctggggtaaacggagcgcattcgattacggaatgggaaagaggcaggcggaagcggccctggtgcaggcatttccggaacaggagtccgtgatggtacgtttccccgtggttcttggaagggatgattacacggaacgactccggttttacgctgcccatacggcgaaggggattgctatgcaggtggaaaatgaaaactgtcctgtaagcttcatttccgcggaggaatgcggccgtttcctggcgtttctggccgattcctccttggaaggccctgtgaatgcggccgcatcggggacgatcaccatcggagagataatccgctatatagaagaaaagacaggaaagaaggcagtcctgtcaccggagggggaagaagccccatacaatggattcccgggattttccataaatacggagaaggcggaaggcgcagggtaccatttttccgtccttgacacctggatttatccgcttctggacttctatggggagacagaagggtaatccggcgttgacttttcttccttcgaatcctataattagtaacgtacaaacccgacttgcttcgatatgatgcgccaaagtcgggtcatttcatttcaaaatgacagcgattcggatgtgcagactgccgcacagctgaatggttataaaaattaagaagacaggaagttgacgcaatgacaaaacgatttgcccagatcatcatcgatatttctcatgagaaagtggaccgcacctttgattacagaattccgccccagcttgaggaccggatttttgtaggcgttctggtgaagattccgtttggaaagggaaattctctgaggaagggctatgtggtcggcatcacggaccacgcggattatgatgcggataagataaaagagatcgcagaaatcgtggaaggcggtgtttcagcggagtcgcagctgattatgctggcgtggtggctgaaggaacagtacggttccacaatgaaccaggcattaaagacggtgctcccggtgaagcagaaggtaaaaccgaaggagaagaaggtcctgcgccttctgatcccggacgaacagctggaggcagtgacagcggaggcggagaaaaagagctataaggcgagagtgcggctcttcaaggcactgaaggaaaaccatgtgatcccgtatgaggtggcgtcaggccagatgaacttatcggcggccaccttaaagccggtgattgaaaaaggctatgtggcgctggaatcggaggaaattttccggaaccccgtaaaggacgcgggcagcagagtaaaggctgtggaattaaataaggagcagcaggcggtggtaagcgcattctgtgaggattatgaagcgggaaagcgggagacatatctgatccacggcattaccggaagcggcaagactgaggtctatatggagatgatttccagagtcataagcgaaggaatgcaggttatcgtcctgattcctgagattgcgctgacctatcagacggtcatgcgtttttacgggcgttttggaaaccgggtttccatcatcaattccagattatcggcgggggagcggtacgaccagtttgagagggccagaagcggcgatatcgatatcatgatcggaccgcgttctgcgctgtttacgccctttgccagactgggaatgattatcatagacgaagagcatgaaggggcctataaaagcgaggtggtgccccgttaccaggcgcgggaggtggcggtgaaacgggcgcagatgcagaatgcttccgtggttctcggctcagcgacgccgtccctggaggcatacacgaaggcgcttcgcggtgaataccgtctgtttaaactgaataccagggccaaggcggacagcaggcttgccgaggtggctgtcgtagatctgagggaagagctgaaggaggggaataaatccattttcagcagaaagctgcagcagatgatcaccgaccggctggagaagaaggaacagatcatgatgttcatcaacaggaggggctatgccaactttgtgtcatgccgttcctgcggggaggccatcaaatgtccccactgcgatgtgactttgacgcttcataaggacaaccggctggtgtgccattactgcggctattcgattcccatgccggaacaatgcccgggctgcggttctccatacattgccaatttcggagtagggacccagaaaattgagatgatgacaaagaagatgtttccgcaggccagagtcctccgaatggatctcgacacgacttccaaaaagggcggccatgaggagattctttcggcatttgcagaaggagatgcggatatcctgatcggaacccagatgatcgtgaaaggccacgactttcccgatgtcaccctggttggcgtactggcggcagatttatcgctgtacaccccggattaccgggctgctgagcgtacctttcagcttctcacccaggcagcgggccgggccggacgtgatgcgaggcacggggatgtcattatccagacgtacaacccggaacactacagtattgtcacggcagcagggcaggattatgagaccttctaccgccaggagatggcataccgccgtctgatgaaatatccgccggccaatgtgctgtttaccgtgcagcttgcatcgaagtcagaagaagcgttagcagaggcagcagacagcctcgcagcccatataacgccgcaggcagacgaggaaaaaatccagatgattggccctgtagacgcctctgtttacaaaattaatgatatatatagaaaaattttatatttgaaacatgaaaattatgatatactaataaaaatcaggaatcaaatggactggttccaacaggaaaagcgggaactgtttaaaggggttatggtacagtatgacttttcatgagcagtgcaaaaagtggcattaagatattttcgttgtgcccgcacataagaaaatatcttaatgacactttttatagggcgaagcccgtcaccgaacgggagcgcagcggacgtgaggtggtgcaccgcggactcccgccccacaaataaactaaaaaacgagaggatacaaataaaatggcaatcagaaaaataagaacaatcggagacgatattttaagaaaacactgcaagccggtaaaagaaatgacaccgcgcatccaggacttaattgaagatatgttcgaaaccatgtacgaggcatgcggcgtcggccttgcggccccgcaggtaggtgtgctgaaacagatcgtggtaatcgacgtggaggatggaaatcagtacgtactcatcaatccggtcatcactgagaccagcggaagccagaccggcagcgaaggctgcttaagcgtaccggggaaatcgggagtggtaacgcggcctgaccatgtaaaagtgaaggctttcgactgtgagatgaacgaatttgaactgattggagaaggcctcctggctcgtgccatctgccatgaatgcgaccatttaagcggcgaccttttcgtcgacaaggtagaaggtgaactgactgacgtagaccaggaagaggatgagacagaggaaggggacgagtaaaatgcggattgtatttatgggaacgcccgatttttccgtgccggcattaacggcactggtggaagcgggccatgatgtaattgcggtggtgacccagccggataagccgaagggacgcggcaaggaagtccagatgcctcccgtgaaggtaaaggctctggagtacggaattcccgtttaccagccggttaaggcgagagatcctgaattcgtcagccttcttaaggagatgcagcctgacgccatggttgtggcagccttcggccagcttcttccaaagaccatcctcgatattcccaaatatggctgtgtgaacatccacgcttccctgcttccgaagtaccgcggggcctctccgattcagtatgcagtgatcaacggggaaccagtcagcggaatcaccaccatgatgatggcggaagcgttggatacgggagacatcctggatcaggagactgttgctctcgatgagaaagagacgggcggaagccttcacgataagctgagtgccatcggaggaagactgattataaagacactgaagaagctggaagacggaaccgccgtgcggactgtgcaggacgagaaagagacgtgttacgtcggaatgataaagaaatcgaagggagacatcgactggagccaggatgcagtctccattgaacgcctgatccgcggactaaatccgtggcccagcgcctacacaggctgggaaggaaggataatcaagctctgggaggccgatgtactggaagaggagtatgagggagcctgcggccaggttgtaaaaacaggaaaagactgtctgtatgtaaagacaggaaaaggaacacttgcggtgaaggaactgcagcttcaggggaagaagcgtatggataccggcgcgtttctgcgcggataccagattgcagagggaaccgtttttgaaaggagcgtctgatacatgttttatggcggtttgatgggatattatttcgatcccacatggattctcgtaattataggtgcggtgctgtcgatggcggcttccgctaaggtaaacagcaccttcagcaaatactcaaaagtcaggagcatgacgggaatgacgggagaggacgcggcaaagcgccttttaaactcccagggcatctacgatgtaaccgtccgtccggtaaagggacagctgacagaccattatgatccgcggacgaagaccgtcaacttatcggagtcggtattccactccacctcagtggcggcaatcggagtggcggctcacgagtgcggccatgccatgcaggacaacgtgggatacgtcccgttaaagctgcggggggcgatcgttccggtggcaaatatcggctcacaggcggcatttccgcttattattatcggggtgctgatcggaggcatgggatctccccttgtaaatatcgggctgattctcttttcactggccgttattttccagctgatcacgcttcccgtggagttaaacgcttccagaagagcgattacactgcttgatcaggttggcatccttggcggccaggaagttaatcagacgagaaaggtgctgggtgcagcggcgctcacgtatgtggcggctctggctgcttccgtgcttcagctgctccgtctcgtgattctgttcggaggacgaagagacaatgactaacggaaacagcagccgggaaataattctggatatcctgctcgagatcctggaaaagggcagttacagccatattgtactgagccaggcactgagcaaataccagtatcttgacaaacaggagcgggcttttatctcccgtatcgtggaaggtactgtggaatacacccttcagctggattacgtcattaattcttactccagcgtaaaagtaaaaaagatgaaaccggtcatccgcacactgctgcggatgtcggtttatcagattctctatatggaccgtgtgccggactccgctgtctgcaacgaggcggtaaaactggcgcagaaacggaaattcaccggattaaaaggctttgtcaacggcgttctgcgcggtatttccagaaataaagaacaactgaaatggccggatgattctgtccgttactccatgccctcctggattctggatatgtggaaggatacatacggggaggagataactgtctctatggcaaaggccttccttaagcccagcaggacggcggtccgctgcaacttaaaccgggcctcgaagcaggagatcatggacagcctgaagagtcagggtgtcacagtggaggagactccgctgtcagagacagtcctgtatttatcaaaatacgattatttagagagccttgatgcgtttgcttcaggcctgatttcagttcaggatatgagctccagctttgtgggagagatcgcggacccgaaggaaggggatgtctgcatcgatgtctgcggcgcgcccggcggaaaaagccttcatatcgcggataaactgaagggaaccggaatggtgaccgtccgtgatttaacggagcagaaggtggccctcatcgaagagaatatcgcccggtcgggatttaccaatatccgtgcggaggtgcacgacgccctggtgccggatcaggcgtgggaaggccgtgccgacatcgttctggctgatttaccgtgctccgggcttggaatcattggcagaaaaccggatatcaagtaccggatgacgatggaacagctggcggagctggcggccctgcagcgggagattctctctgtggttcagtcatacgtaaagcccggaggaaagctgatatacagcacctgcaccatcgacagtcaggaaaatgaagaaaatgcggcgtggtttctggagaattttccgtttgacgccgtgaatttagaaggaaagttaggagaaacactgaatgcggcttccatgaagtcaggcatgatccagctcttaccgggaattcacccgtgtgacggatttttcattgcggcatttcagaaaagataagaataatggaaaagacagatattaaatccctgaatttagaagaacttacggcgtttataaccgcttccggtgaaaaggcgttccgggcaaaacagctctatgagtggatgcacaaaaagctggcgcctggatatgaggagatgacgaatctgccgaaggcactcaaggaacggctcaaggagacgtgtgaatatacctcgcttcagactgtggatgagaagatctccgccatcgacggaaccagaaagtatttattcggcctgtcggacggcaatatcatcgagagcgtcctgatgaggtataagcacggtaattccgtgtgtatttcctcccaggtcggctgccgcatgggctgccggttctgcgcctccacgctggatggcctggaacggaatttaaggccggcggagatgctggaccagatctaccggatccagtacctcactggggaaagggtctccaacgtggtgattatgggttccggagaacctatggataactatgatcatgtggtgaagtttatccgccttttgacggatgaacacgggcttaacgtcagccagcgcaatgttacgctgtccacatgcggtattgtgccggggattctgaagctggcagacgaggggcttgccattactctggcgctctcgcttcacgcgccgaatgatgaggtgagaaagaccctgatgcctgtggcgaagagctataagctgaacgatgtgctggaagcctgtcatacatattttgagaagacgggaagacggctgacctttgaatacagtcttgtcgccggagtcaacgataatctggaggaagcggcggctctggcggcgctgattaaggaccagcagggccatgtgaatttaattccggtgaaccccataaaggagcgtgactacgtacagtcggacagaaaagccatagaggcctttaaaaatctgcttgaaaaaaatggaattaatgttactataagaagggaaatgggccgggacatccatggtgcctgcggtcagcttcgaaaaagttttttaacagaggaacaaaaagggagtgagaagacgctatgaaagcttgtgcattgacggatacgggaagagtgcgcacggccaatcaggattacgtatatgccagtgtggaaccggtcgggagcctgccaaacttattcgtggttgcggatgggatgggcggccatcaggccggagactatgcctccagatatattgtggaaaatctggtgtcgtatcttcagtatacggaaaattcccagattgttccgcttctgcgggaggccatattaaaggtcaacaccatgctctaccatgaggcaaaggaaaagccggagttttccggtatgggcacgacgctggtggcggcggtggccgatgagaataccctttatgtggccaatgtgggagacagccgcctctatctcgtgagagacaggatcagacaggtgacgagggaccattcttatgtggaggaactggtttccctgggccgtctggagcgcggaagcaaagactataaggataaaaagaatattataacgagagcggtcggcacagaagataagctgttggtcgatttcttcgaggtaggactggaaccgggtgactatattctcatgtgttccgacggactcagcaacatgctggaggacgcggagatggaggagatcatcggttctgatttagaactacaggaaaaggcggagaaattgattacggtagccaatgacaatggcgggaaagacaatatcgcagtggtactcgttgatccgcagattggcagggagggaagcttatgattttgagaccaggtacatttttacaggacagatacgaaattttagataaaatcggttccggcggaatgtcagatgtgtacaaggccctgtgccataagctgaaacggcaggttgccattaaggtactgaaggaggaattcagttcagacagcggatttgtgagcaagttcaagatggaagcccaggctgcggccaggctgtcccatccgaatattgtaaacgtatatgacgttgtggatgagggaacgcttcactatatcgtcatggagctgattgagggcatcaccctgaaaaactacatcctgaaaaagggctgtctcgacagcaaggaagccatcgggattgctatccaggtggcacagggaattgcagctgcccatgaacagggcatcgttcaccgggatatcaagccgcagaatattattattgcacgggatggaaaagtgaaggtggcggattttgggattgcacgcgccgcatccactcagacgctcagtgctacggctatgggatcggtccactatatttctccggaacaggcgagaggcggttacagtgacgcccgcagtgatatctactcgctgggcattaccatgtatgagatggcagccggacgggtgccgtttgaaggggagaataccgtaacggtggccctggcgcacttagaagacccgatcacaccgcccagttatttcaatcaggagattccggtcagttttgaaaatattattttaaaatgcacggagaagaagccggaataccggtatgggagcatgcaggaggttattgccgatttgcggcgggccctcgtgactcctgatgagaactttgttcaggcatcggcgccgtctatggatacctctcagacggtgatcatcggagcaccggagctggaacagatcaggtccggttccggacgcagaaatcagccggaaccgcagcctggccggaaccgcagctatggcggtgaaccggtgcgggaacgtcagccggagcacaggagcagccggaatacctctggcggcagcccttccggcagaacgaagcggaaggagccggatgaagagatcaatccgggtatcgaaaagcttctgacggccgccggcatcgtggtggcaattcttatcgtcatcgtccttattttcctggttaccagactgggagggctgttccgttccggaacccccaaggagacagagaccactgtggagacgacacaggaggagacaactctgggtgagaagcagacgaccatgccggaggtggagggactggcggaagacattgcaagacagaagctccgcgagaacggcggtctggacatgaagatcggtgattatgagttctcggatactgtgaaaaagggagatgtcatttcccagacccccaaagcgggagagattgtagaccggtactcggctgtctccgtagttatcagcagcggaccggagcatccggagattgacttaaccaccctggggctggattccctcaccgcggaggctgccaagacgcttctggaggggaaaggcttcattgtgaatctgcagaaccagagcagtgatacggtggagtccggcaagatcatcagctacagtccgtctaaggcaaaggaaggggctgtaatcagcgtgattgccagcactggcccggcgctgaccaatccggttgtggttcctgatattacaggcaaagaggaagaggtcggagaggagatgctggccgacttagggctggttcgcggaaccgtgacgaaggaaacctcggaggaggtgccggcaggaacgattatccgtcagaccatcgcgccgaatacgcaggtggagggcggaactgccattgattacgtggtcagcagcggatcggcggagcaggccaaatataagtacctggcttccatcgagaaatcttatccgcttcagaatctgatcggcccgggatctgccagcacccagctgaatatcaagatacagctgaagcagaccgtgaacggtaaagatgaattcagggatctgatggggccggtgacgattacgggagaccagcagcttccggttgtgttcaagaacatcgagggagcctacggcgtgaccagcggagaagtgcaaatagtcaatgtggacacgggagatgtaatcaattcttatccggttacgtttgtccccattccacagtcataaggatattgtatgacagggaaaattattaaaggaattgcaggcttttactatgtggataacggaacggacgtctatgagtgcaaggcaaagggcgtgttccgcaacaaaaagatcaaacctctggtgggtgataatgtggaatttaccgtgttgagcgaggcggagagggaaggaaatatcgataagattctcccgcgcaaaaacgaactggtccggccggcagtggccaacattgatcaggcgctggtgatattttccattactcatccggagcccaatctaaatcttctggaccgttttctggtcatgatggaggtgcaggaggttcccgtgaagatctgctttaacaaaacggatttaacgggagacggggagcgggaccgtctggggaatatctattcctcagcgggctatcccgtctattttacgagtacttacgaaaacagcgggctggatgagctgcgggtgctgacagagggaaagacaacggttctggcggggccgtcgggcgttgggaaatcctccatcaccaaccttctgtttccggaggctgagatggaaacaggaaagatcagcgagaagatccagagaggaaagcatacgacgaggcacagcgaactgtttgccatcgggaaggacacctatatgatggataccccgggcttcagttccatgtacttggaggaactggaatgcggaaatttaaaggattattttcctgaattcgcggcttacgaggaagactgtaagtttctgggctgtgtccatgtgggcgagccggtctgcggtgtcaaggaggccgtacgccaggggaagatcagtgagagccgttatgcgaattataagctgttgtaccaggaattaaaagataaaaggagatattaatgatgttcctattagcaccttccattttgggagcggattttaaacatttggagcagcaggtatgtgaggcggcggatgcgggagcgcagtatatccatctcgacgtgatggatggggatttcgttcccagcatttcattcggtatgcctgtaatctcaagcttaagaagctgtacggacaaggtgtttgatgtccatatgatggttcgggagcccggccgttacatcgacgccatgaaagaggcgggggccgatatcatcagcgttcatgtggaggcatgcacccatttagaccgcacggtgaaccagattaaggaggccggtataaaagcaggagtcgtgctgaatccggccacaccgattgatgtgctggactgtatcctcgatcaggtggatatggtactgcttatgacggtgaacccgggattcggagggcagaaatttattccctacactctggaaaagatccgcgctttaaggaaaaaatgcgatatgcgggggctttccacggatattcaggtggatggcggcgtgacgtgtgacaatgtgcgtgatctgatggaggcgggagccaacatctttgtagccggttccgcgatttttaaaggggatgtgacggcgaatacaaaggcatttttaaagatatttgaggaacaggaatgacgggccttattatcaccggcggaagcataaactgtgcattcgccggtgcttttttgaagatcagggaatttgatatggtgatcgccgtggatggagggctggccgctgttaaaagcctgaatatcaggccggatgccattgttggtgatttcgatacggtaaagggcgaacttctggaagaataccggaggatgggaggcattgccttcgagcagcaccagccggaaaaggatgagaccgatacggagctggcactccgcaccgccatggaggcgggcgtgaacgacattgtcctcctgggcgctaccggcggcaggctggatcactccatcggtaatatccatctgctgtatgcatgtctccaaaaaggggtgaaggcctcgatcgtggatgagaagaaccgtctctatattctggatcagggaaagacttaccgtttcggtgagatctgggggaaatacatttccttcctgccgcttacagaggaggttcacggaatcactctgaagggctttaaatatcccctgacagaccgggacatccggatcggaaccagtctgtgcatcagcaatgaactggcagagaagaccgggaccatcaccttccgggatggggtgctgatctgtgtagaatcacacgattaagcgctgcagactggccgtgccagagagtgcagcacctaactggtatggtctaaaaaaacaaaactggatatttatatcactccactcaggtgctaagataaggggcagaaaagctttggcaccaagggaggaaaaagaaatgaacagaacagacagtaaaatcagtaaaattgccatgacgggattatttgcggccatgtcgtacgttgttttcacgttcctgcagtttaaaattacgcttccgggaggcgacgctacgtccattcatttgggaaatgcggtctgtgtactgggagcgcttttgctgggcggcgtatacggcggcctgggcggggccatcggtatgacgattggcgatctgcttgatcccatctatgtggtctatgcgcccaagacatttatcctgaagctgtgtatcggactgattaccgggttccttgcccacaggcttgggaagatcaatgaatcccatgaccagaagcatattttgaaatgggttctgatcgcctcagcgggcggactgctttttaatgttattttcgacccgcttgtgggatactactacaagctgctgattctggggaaaccggctgcggagctggcgcttgtgtggaatgtcacatcgaccaccatcaatgcggtgacttcaacgattgcctctgtcgttatctacatgccgctgagaagcgcgcttatccggtcaggaatggggcttatgagatcttaactgcagagccgcaggcaaaaaaatgttaggagttttacggatatgacatcagaaagacatcagaaaaaaattgcagtaatcaatgatttatcaggatatggccgctgttcgctgacagtggctattcccattttatcggcgctcaaggtacagtgctgtccggtgcccacctctattttatccaatcataccggtttcccggtgtattttttcgacgattatacggaaaagatggagccctacctggaaaaatggacggagctggggctggagtttgacggcattttcagcggctttctcggttcagaagcacagattgggatcgtcatgtctgcgattcgccggtttaagggaaaggatacgctggtggtgatcgatccgatcatgggggatcacggaaaggcgtatcagacatacacgcctgccatgtgcagccgtatgaaggaactggtaggtctgggggatctcgttacgccgaatctgaccgaggcctgtatcctgaccggcagagagtaccgggaggaagggtggcacagagcggaccttctggccatggcggaggaaatccttaagatggggccttccggagtcgttataacaggcgtcaaggaaggcgcgtatttaacgaatgtcatcgcagaacgggaccgggaagctgcattttgccggtcactgagggtcggccgggaacggcccggcacaggagatgtcttttccgcaattgtggcggcggaggcggtaaaaggctcgtcccttaccgatgcggcgaagaaagcggcgcgttttgtcaaacgctgcatcttaaaatccgaggagttggatgttccggtacaaaacggagtatgcttcgaggaagtgctggcggaattgataaaatggaaataaggggcttttctttgcctgtaatttgtagtataatcaacggcagattaccatattgggcaccaacataccaaaaatggaagagaaaccaggaggaataccatgttagatttaaagtttgtaagagaaaatcctgaggcagtaaaacagaacatcaggaataaatttcaggatagcaagctgccgctggtggatgaagtcatagagctggacgagttaaaccgcgccgcaaagcaggaaggcgatgcgctcagagcggaacgcaataaactttccaagcagattggcgggctgatgggccagggaaagaaagaggaggccgaagaacttaagaaacaggtaacagcggcttccgaccatttggcagaactggaagagaaggaacgggaactggatgaaaagatcaaaaagatcatgatgaccatcccgaatatcatcgatcccagcgtaccgatcggaaaagatgacagcgagaatgtggaagtgcaaagatacggtgagccggttgtgccggatttcgaggtgccgtaccatacggatattatggagcgcttcgacggaatcgatttagacagcgccagaaaagtggctggaaacggtttttactatctgatgggcgatattgcaagacttcattcctctgtaatctcctatgcgcgtgatttcatgatcaaccgcggctttacgtactgcgtaccgccttttatgatccgcagcgaggtagtgaccggtgttatgagttttgctgagatggatgccatgatgtacaagatcgagggcgaggatttatatctgatcggtaccagcgagcattccatgattggtaagtttatcgatacgattattccggaggaatcccttccgaagacgcttaccagctattctccgtgcttccgcaaggagaagggcgctcacggtctggaggagcggggcgtttaccgcatccaccagttcgaaaagcaggaaatgatcgttgtatgtaagccggaagagagcatggaatggtacgataagctgtggcagaataccgtcgatttattccgttccctggatattccggtaagaactctggagtgctgctccggcgaccttgccgacttgaaggtgaagtctgtggatgtggaggcatggtctccgcgtcagaagaagtactttgaagtgggaagctgttccaacttaggcgacgctcaggcgagaagactgaaaatccgcgttaacggagagaacggaagaaagtatttcgctcacacattaaacaacacggtcgtggctccgccgagaatgctgattgcatttttggagaataacctgcaggctgatggaagcgtgaggattccggaagtgctgagaccatatatgggtggaatggaagcgatggttccgaagggtcataaatagaaagaaaaaatcaatacagataaagtttgaaaaggaaatggctcttgctgtttcctttttcttttgccctcaagcagcgttagaaattcccctgaatgataatgtcaaaaaagtatgaaaaaaaatcatactgtgagaaagaacaggcaggtggtatgctaaagacaagaaaagagagggggaaagtttatgaagcaatgggaggaatatcgtattccggcagcagaagtgagaaggatttccaggataccaatcacatgtctggaggaccagacttccgtattcagccgtatggcactggagatgacggataagattgaggaaaataaccggcaggggaagcggacagtgtttattattccattcggaccgaccggacagtatcccgttttcgtggatctggtcaataccagaagaatcagtttaacacaggtatggttaattactatggatgactggctggacagcgatggtgatctggtgggactggataatattcattcattgaggcggaagatgaatcaggttctctattccaaaatcgataagagtctgctgatgccggaggaacagcgtatctatcccgatcccaaatggctggtccggattccagatttaattgaagctttgggaggcgtggatatctgctttgcgggatttggcatcaacggtcatctggggtttaatgagccttctgatttaagcatagaggagtttgcaaagctccctaccagagtcgtgaaaatatccgagaccaccaggacgattaaggcttccacaggagtgaatggagcaatggaagatattccgctttatggagtcacggtcggtatgaaagaaatgctgtgtgcggaaaaagtcagtgtttactgcttcagagactggcattccggggcaatcagacgagcctgctgcggaactgtctcggccagttttccagcctcactgctgcaaaatcatccaaatgcttccatcgtctgttcaccgaatgcaatagctcagtgctattaaaggaggagtggctatgaagtggatcaaaataaagaacaagagagtctggtcctggatttctctggttttatgcctggcggtatggcagatgatctcagtatcggaggcaggtgccgtgtttgcgtctccgaaaaaaacactgatggcgtttatcactatggcgcagagcggagctatctgggttcatatcggctacagtttattccgggttatcaccggctttttgctgggactggctgctgccattcccatagcctttctgatgggctggtataagactgtgcagtatttgctggaaccggtggtacagtttatcagaacgattccgcctattgcttatataccgcttgtaatcgtagcactcggcgtagatgaatcgtccaaaattatggtaatattcattgctacatttctcgtcatggtaattacgatttatcagggagtcaaaaatgtggattccacactggtgaaagcggccagagttctgggggcaaacgacagggatatcttcttccacgtcgtggttccggcatcgtttccatttgtgctgactgccatacgtcttggactgtccgccgggcttaccacactgatcgcatcagaattgacgggggcgagtaaggggctgggaacaatgatacaggaggccagcatgtatttccggatggatgttgttatcatggggattatggtgatcggaatcatcggtctggcgctcaataagatcgttcatatactggaaaggtggctgacaggatggcaggaaacgcatcaggcaacgtgattgtaacgattgatcatgtggagaagatctatcagggcaggagcggcgaagtggtggccttaaatggtgtggacatggagattggagaaaatgaatttgtctgtgtcgtaggcccctccggctgcggaaaatcaacgcttctaaatattatcgcaggtctggaaaaacctacatctggccgggtctgtgtaaaaggaaaagaggtggtaaatccgggaagcgagcgaggtgttatctttcagcagtatgcgctgtttccatggctgactgtaaaaaagaatgtgaaattcggattgaagttaagaggggtgaaggagccggaactgtctgcaattgcagataaatatatccggctggtaggtctggaggaatttggcgacagctatcccaaggaactgtcaggggggatgaaacagcgggtggcgattgccagagcctacgcggtgaatccggaaattcttttgatggacgaaccttttggcgcgctggatgcccagacgagaacacagcttcagacggagttattagagacgtgggagaaggaaaaaaagacttgttttttcatcacccatgacgtggaggaagcgattatacttgcccagagggtggtgatcatgagcgcccggcccggaagggtaaaagagattgttccagtaaacattccttatccaagaacgcaggaaacgaagatgacgaaggaatttttggacttgaaagttcatgtatggggacaggtgtacagggaatttctggaagtacggaaataagggtttacaactattctggagaaagataagatggagaaggaggaaagaatatgaaaaaattaccagttggcttactgacagtgatgctgtgcggaatattggccggatgttcaggagagggagtaccgaagcagaacacagacacgaaggcaccggagataacgacagaggccaggcagcagacagaagctgcggcggcagaaatgacggatggggcagaaacgacagagtcctcgaaaccggagacggtaaagctcagagttgcatatcatccgaatttcggaggaaataatctttatattactgcggaaaaaaacggcttttttgaagaagaaggactcgtagtggaaccggttaagtttactgccggccctcaggaaatcgcagcgatggtggccggagatgtggacattgggtatattggccacggtgctacatttttggccgtacagaggcaggtgaacgtgtttctgacagaatttctggggaatggggatgagcttttaacgtataaggagtctggaattacatctctggaagatttgaagggaaaaaccattgctacagcgccgggaacttcgggagaaaccgtcttaaagctggcattggaaaaagcgggactcagccgtgatgatgtgaaaatcgtcaatatggatgcggcagggatggtggcggcgattgtggcaaaaaaggtggacgcctgtacgctctggccaccgcagaccagtgaggttcgaaaaaccatgggagaagaaaatgttgtgaagctggcctcaattggtgatttcagagatcagtttgcgtttccgggccattgggtggtgactcctaaatttatggatgcccatccggatgtcatggtgcgcttttcaagggccatgctgaaggcaatggattatcgaaaagaacatccggaagagacagcagaaaatgtagctgaatttattgatgcgcctctcgacggtgttgcagcggagatgaacaacattgatttgtttgacgcggattactgctaccaggtgatgactgacggtactgcggcgaaatggtatgatgcgcttcagaatttatatgtacaggatggcaaggtggagaaaactgtgccggtggctgaatggttttgtcctcaatttgccaaagaggcatatgaatcttaccataaatagatggagaaagaacgatgttaatcattatgatggcgttgatcggcgtggtggcgctgattgttgtggggctgcgccgggataagatatctcttcttattctggcgctgtgcggaagctttatcgccatgctcgcaggaattgtgatttatacagctaaaatcggaggcttttcgaggaaccagcagattctgctgttcctgctgccgaatattcaacagtatttgcagtaccttcccattacccttgatgttcagggatacgcagcggcggtgggaaggtgctgctttccctgtattctgcttctgatttccctcaattattctatgagcactctggtgcgcagacatatgagaaaattaaaaattctggtgtatactgtcgtgatatggctggtctattactatccggcagtctttcggctgtgggtgagaggaagaggaaaactgcagaactttatgggggtcatggcgatggcatggattatggtctgcctgctgctggctttgttcctgttgattcatgaataccagagtatatcaatcccgtattttaagaagaatttcagatatattctgctctcttatatcagtatggcatttttgtaccttatctatggcttacaggatccggcgcagatttaccagtactacggtctggaatttctatggatatggcgggggagctatacggcgggaatcatgtactctttttcctgggctgctctggttctctgttcgatattttttgtcatattaggttccgtgaatctgctgcgttatactcagatcacgtataatcaggatatggaaacggtgtatttacagagcaaatttgatcagacgagtctgggggcctcggtgtttgttcacagtatgaagaatcagcttctggctaaccggattctgaataagaagctgggacgggcactgaatgaggattctccggatctggaaaaaatacggggagtggccgctcagctgaatcagcttaatgagtcaatggtaacacggatggaagacttataccgcgcgatccactccaattccatactgctgacgcctgtctctgtacgcgagattgccgaggcagccgagggccgtttttatcaaaaatatccggacaggaaggttacggcagaaatctgtgatgatgggatgattctggcagacagggagcatcttgctgaggcggtttataatttactctgcaacgggcaggaggcgattgctgaagccgggcgtgaagcaggagcggagttacgtctgactattaaaaggcagcgcctttatatggtactggaggttcatgataatggtaaggggatttccagaacagagcgtctgaagatctgtgagccgttttatacgagcaagaatacgagttataactggggaatgggtctcttctatgttcggaatattgttaagagccattacggcacgttaaggattgaaagccatccggagacgggaaccagtttctttattatgctgccaggatatggcacaaaagatatggagaagagggggtgaaatcacggaaagaaaaataagaattctggttgcagaagattttgatctgctgcgtgaagatctctgcgagttgctcaactcccagaaagacatggaaactgcgggaagtgccgatggaaaagaagagattgtgaagctggcacagatgatggaatttgatctgatactgatggatatagagatggagtatttgacttcagggattgaagcggcggaagagatacggaaggaaaagccggaggcacagattatatttttgacggcacacgacacgaaccagatgatctatacggcgatgggagcaggcgctgtggattatatcgttaaaggctgccccgatgaggaactgcttttccacatacgcagcgctgtttctggaaaaccggtgatggaagccagaattcagaagatgctgatgagcgagtattccagattaaggcgcagtgagcagagtctgctgttttttattactaatgtggggcagctgactcccgtggaacgggaactggtgcgcctgctgctgcagaattacaaggtagggcagatcgccgaacttcgcgttgtggaactggtcacggtaaagactcagattaagagccttctaaaaaagtttaactgtacgcgcacaaaggaaatcgtaaatttgattcatgaattgaaattagagcatttgtttctttagccgtcgccaggctgcgatgaacgccctctggcagcggcttttgttttgcctgtatgatatgaattatgaaataatagactcaaatatatagagaataacagcttcatgtgatatactgattttatcccgcagtggctttttttgccgttcaagctgccggatttgaagcaaaacattcagagaagacagaatcaacaggataaggagaaaagaatatgatatcattcaaccattttaactttaacattctcaatctggaaaagagtctggcattttataaagaggcgctgggactcacaccggtccgtgagaaggaggcttccgacggttcctttaaactggtctatttaggggacggtaaaagtgattttacactggaactgacgtacctgacagacaggaaagagccatacgatctgggggaatgtgaattccacctggcatttaccacagatgagtttgacgcgctttatgagaaacacaaagaaatgggtgttgtctgctttgaaaatccgggaatggggatctattttatcagtgatccggatggatactggattgagattgttccggagaggggataaacggagcgctttttcagacgtgctgccaaatagaaagaggaggggaacagatggaactacatgtcaatggagtcaaattatattaccgcgtttcgggccatggtccggcagtaatcctcgttcatgggaatggggaagaccattctgtttttgatgagacagccgcgctgctgagctgtgattacaccgtttacgccctggattccagaggacatggaaagagcacggccgtggagacccttgggtatcagaacatggcggatgacgtggcttcctttatcaaaaaactggatatcagaaaaccggcgttctgcggcttcagcgatggtgcaatcatcggtatgctggtggcggagcagaatcccggcctgctgtcaaagctgattctctgcggagggaatgcctatccccaggggataaaggagaaatggttccagctgttccgcctgatcagccatttcgacagggatccgaagatccggatgatgctggtggagccgcagattacagaggaggaactgaaacggattggagagccggtgctgattctggcgggagagaatgatatgatcaaggaagagcatacccgttatctggcatcgaagattccgaacagccgcctcgtgattgtccccggagaaaatcacggcagctatgtggtacacagcagaaagctgtaccatcttattaagaaatttcttgccgaaccggtgaaacggcaggaacagggaggaaatacgcatgatgattgatttgacggttgaagtcacgccgaaggcggcggctgatgcccagggaaatgagaaaaaagcgctgaccggccatctgggtactcattttgacgtgatggaccgggaatttccgctggagtatgtgataagaaaaggtctggtatttgatgtcagccaggtctccggccgtgatatcgagtccggagatattgaactggaccgcgtggagccgggcatgtttgtggcgttttccacaggatttctggagcaaaccgggtacggcactccggtttattttaaagagcatccgcagctttcggatgagctgatcgaccggctgctggacagaggcgtttccatcatcggaatcgactgtgcggggatccgccgcggagcagaacatacgccgaaggatcagtactgcgcggaccgaaatacctttgtagtggaaaatttatgcggtttatccgggatactggagggagaaatggccgcggaggccaccatttatacgttccctgtgcgttttaagggtatgacagggcttccgtgccgcgtagttggagagcggtcagcgggctcctctgcgggctgtcatcgccaataagccattggacagtaagccataattgatgacagataaaaataaatatgggtgtaaagaaaaaatacttgacacccatgataaagtagtgtatgatagcacaggtgatgatatggaaaagattgcaagacagggcctgctgtatgatttttacggcgcgcttctgacagaacaccagaggcaggtttacgaggacgtggtgctgtacgacttatccttaagcgagatcgcggaggaacagggaatcagccgtcagggcgttcatgacctggtgaagcggtgtgacagaattctggaagattatgaagaaaagcttcatttgatggaaaaattcgggaatacgaaacggcttgccagagagattcagagtctggcgggagaattttccagaacgggcgacaggaatctgctccggcgcatcgaggagatatcgggcgaaatcatcgacctggaggctcattagaaagggtagatcaggaggacattagatggcttttgagagcttatccgataaattacagaatgtatttaaaaatttaaggggcaagggacgcttgacagaagcggacgtaaaggctgccttaaaggaagttaagatggctctgttagaggccgacgtaagcttccgggtagtaaaacagtttatcagcgctgtacaggagcgggcggttggacaggatgtcatgaacagcttaactcccgggcagatggtaataaagatagtgaacgaggagcttgtcaacctgatgggttccgagaccactgagattcacttaaaaccggcaaatgagatcacgatcatcatgatggcaggtctccagggcgcgggtaaaaccacgaccacggccaagattgccggcaaattaaaggccaagggaagaaaacctcttctggcggcgtgtgacgtctatcggccggctgccatcaagcagctgcagatcaatggcgagaagcagggagttccggtgttctccatgggagaaaaccacaagcctgcggacattgcgaaggcagcggtggaacacgcgtcaaagaacgaccagaatgtggtaatcctggatacggccggacgtcttcatattgatgaagacatgatgaacgaactggtggagatcaaagaagccgtggaggttcatcagacgatcctcgtagtcgatgccatgacgggtcaggatgcggtcaatgtggccggcatgttcaatgataagattggtatagacggagtcattttaacaaagctggatggcgatacgagaggcggtgcggcactttctatccgttcggtaaccggaaagccgattctgtacattggtatgggagaaaagctgtccgatttagaacagttttatccggaccgtatggcttccagaatcctcggaatgggcgatatcctttcactgattgagaaggcggagacccaggtggatgaggagaaggcgaaggaactgtcccagaagctccggaaggccgaattcgattataacgatttcctggatcagatgaaccagatcaaaaagatgggcggtatgtccagtattatgggcatgatgccgggtatggggcagatgaaggacgtggaagtggacgagaaggccatggaccgggtggaagccatcatcctgtctatgacgaataaggaacggacgaatccggatcttatgaaaaacgcttccaggaagcagagagtcgcaaagggcgccggtgtagatatcagtgaggtcaaccggattgtcaagcagttcgatcagatgaagaagatgatgaagcagcttcccggcatgatgggcggcggcaggaaaaaaggcggattattcggaaagcttaagatgccgttttaaaaagtcaggttagcaaggcagtttgactgcgttgactatagattcgcagtatgcgaaaacataaatattcaaggaggtgaatcacatggcagtaaagatgagattaaaaagaatgggacagaagaaggctcctttctatagaattgtagttgcagattccagatccccaagagatggcaaattcattgaagaggttggttattacgatccgaacacagatccgagcgtaatcaagttcaacgaagagtccgctaagaagtggttagcaacaggtgctcagccaactgagaaggtaagcaagcttttgaaaatcgccggcatccagtagtttaataggaaagtcccccttacatccgtttgggggaaagtggtgaagcatatgaaagaattagtagaagtaattgcgaaagcactggttgataatccagacgaggttgctgttaccgagtctgtgaaagacgacgaaatcgtccttgaacttacggtagcgccttccgatatgggtaaagtcatcggcaagcagggcaggatcgctaaggctatccgttctgtagtaaaagcagcagcttccaaagaagacaagaaggttattgtggaaattcagtagccaatacgtaaacgaagaccgccggcctgtcaggaagacggtcttttctatttctgttttgcaagggagataaaagatggaacagttactgagagtcggagttatttcctccacacacggtgtgaaaggggaggtcaaggttttcccgacgacagatgacgccgcgcgctttaaaaagctgaagcaggtgattctggacacgggaaaagaacagctgaaactggaaattgagggtgttaaattctttaaaaatatggttatactgaaatttaagggatatgacacaattgaagatatagaaaagtacaagggaaaagacattcttgtcacgagagaccaggcggtgaagctgggccccgatgagaattttattgtcgacctgatcggtttaaaggtggtaaccgaggacggggaaccattcggaactttgacagatgtcatcaagaccggcgccaatgatgtgtatgaggtgaagacggcggaggggaaggaagtcctttttcctgcgatcagagaatgcatccggaatgtggatttggaggcgggagtcgtcacggtccatattatggacggtcttctcgacttataaggaggaaaatatgaacttccatatactgacgttatttcccgatatggtgttaaacgggcttcacaccagcatcatcggcagagctgtggaacatggcctgatttcgattgaagccattgacatccgggaatattcgacggacaagcaccgccacgtggacgattacccctatggcggcggtgcgggcatggtgatgcagcccatgccgatctgtgacgcctacgacgatttgtgcgcgagaatcggaaagaaaccgagagtgatctatctgactccccaggggacggttttcaatcagaaaattgcagaggaactggcggaagaagaggaactggtatttctgtgcggccattatgagggcgtggatgagcgtgcgctggagctggtggccacggattacttatccatcggggactacgtcttaaccggcggagagctgccggctatggttatgattgactgcatctcccgtctcgttcccggggtgttaaataacgatgtttcggcggaatttgaatcctttcacgataaccttctggaatatccgcagtataccaggcctgaggagtataaaggcctgcgggtccctgaggttctgctctccggtcatcataagaatattgaaacgtggcggagagaacagtccatcaaacggacgtatgagagacggcccgacctgttaaaggatgcggtgttgtcgaaaaaggaacaggaatatctggagagactggcgaagaagccggaaaatcaggatatacatgttgaatttcaaggttaatgcaactttattaaagtaaatgcaactcatgcagctctattttgcccaaaaagtaaaatagggctgttttttgtgccggtttcgtgtaaaataagagtaatccaccacgaaaagccttaaaaatgggcgtacgataccggaggtgagatttgcctgcttttttatcagagtaaatgccacccctgtttcggcgttggatttgatagggctgggtctgggttgattgttaagggggcttggggaagcgtggcccttaacattgggtttgtcggaagaaagggaatggcgatgccagtccccggctttccggcttttttgtttctatctgtttaaaagtgcaggggttaaatccacttcgtttggcgggatcctatggcatcccaatgcatgaagcagatccgcaccgtagaggaattcaaacaattcatatggacatttatttccgagactttctctgctgtaagagttgatgtggtccataagcagagaaatgtctccttgagtcagttggtcaaaagaagtccctttgggaaggacataccgtatgaattcatggtttttctccgcagagcctttctgcccaggggaagaagcgtcgcagtagaacaggcgtgtgcgcagatttccctgacggtcatactcgatggctctggggttagagaattcacttccattatccgtgaggatcagaggcatgagggacgagaaccggtccggcccgagttccagatacaggcggtcaaaaatatcgatcacggactgggaatcgttggcatcccggagaaaagcaagcatcagttctgtcttgacaaagtggagggtcaggagaactttcccaccctttttcccttccacagaatccatctgcgtgacaggcaggtccgggtgtctggaacaatgattgagataagcttcataggtacgcccggaccggcaggccttatcgaccttgaactcttttgcttttctgcgccgactgtagcggactttcctggggaggtcgatattcctggccttaaatacgttgtagtcaacgagacggtaaagggtgctctcactgaccataagcgagtccctgttgttggcacagatatggttgagagactggccgcggaagatgagcggggagacaatggagtccagccgacggatatcctcctcggaataagagatgccggtcctggattcagaaagcagttcccgatactccttatgtgcatagtcagcggaataaagatgtttttccagggtgcaggagcgcctgtccgggcagccgttgcagacataaggaggcattaagagcctgctgcaggactcctgctgaaagtccggacaattggcattgcacttgtcacagaaggaacagcgttttctattcgaggaaagacacgaagggcagagggtgctgtgggaacaatctttacggaggagacaggcgttgtaatgtcgcccatagccgccggtcttccggaagaggatatggtttcggacctccctggaaatcgaggtacagtttttgccgacagcgagagcgatctgtttaaaagagcactgctcagaaagcatgtgaacgattgtgattcggtcatcgagggataaatgtgttttcttcataataaaacctccagtcgtagtacccagacccgacagaaggatgatacaaaatttgtcatactaaatgcaacctttaatatttttaaagtaaatgcaactggcagtgtatataggggttgcatttactttgaaaatttactataggatatacaggaagaaaattgcaaaaagggacttgcaatcgacaatcctttatgataaaatattagacgttgtgacgcaaggagatggtcctctgttacggattacgtcagtatgaagtattaagaacatcaaatataatcaaggaggttcacacgatgaacgacattattaagaatattgaagcagcacagttaaaggaaacagtaccggagttccacgttggcgataccgttaaggtatacaacaagatcaaagagggaacccgtgaaagaatccaggttttcgagggcacagtcattaagagacagaacggcggcgcaagagagactttcacagtaagaaagaactccaacggcatcggcgttgagaagacatggccattacattccccttctgtagacaacatcgaagtggtcagaagaggtaaagtaagaagagcaaaactgaattacttaagagacagagtaggtaaagctgccaaggttaaagaattagttaaataatggacgaatcaggattctggaagttgtgagggggacaatgaaaattgtccctttcttagtagatggggtgcatagagagtggaattttataacagcgaagagaacaaccggattcgccatgtggttaactggattgtagacattaccgttgtgatcgcctttgcatggtttattgtctatgcctatggaacccagattccgattgcagggcattccatgacgccgcttctgcagtcagaggatattgtgttaatggatcgcctgtcttacgatttcgggaagccggaccggtttgatgtggtggtgtttgaacgggaagaccggaaaatgaatgtaaaacgcgtgattggactgccgggcgagaccgtacagattaaaggcggccagatttatataaatgatgaatggattgaacagccggaaggggccaccagcatttcgctggcgggaatcgcggagaaccctgtaaaactgggggaagacgagtattttcttttgggcgataacagagacagcagtgaagacagccgtttttccaacgtggggaatgtgagcggaaagcagattcagggaaaagtatggatccgaatcgccccgttggcaaatctggaactgattcgttgagatagaggtacgtgatatgaatatacagtggtatccgggtcatatgaccaaggccaaaagggccatgaaggaagatatcaaattaattgacttaattatagaactggtagacgccagggttccgctctccagcaggaatccggatatcgatgatatcggagcgggaaaagccaggctgattctgctgaacaagtccgatcttgccgatgagcgctgcaacttaaagtgggccgcctacttccaggagaaggggtacttcgtggtaaaggtaaattccaggagcggagcgggcttaaaggcgataaacggcgtcgtacaggaagcgtgtaaggagaagattgagcgcgaccggagacgtggaatcttaaaccgtccggtccgtgccatggtagtgggtatccccaacgtgggcaagtccacgtttatcaattcctttgccggtaaggcatgcgctaagaccggaaacaagcccggggttacgaagggcaatcagtggatccggcttaacaaaagcctggagcttctcgacacaccgggtatcctgtggcctaaattcgaggatcagacggtgggaatccgccttgcgctgattggttcgatcaacgacgagattttaaataaagacgaactggcactggaactgatccgctttttgcagaaacagtatccgaatgtgctggaggataaatatcaggcagacgcttccgacgcagtagaacttttaaaccagattgcaaaggccagggcgtgcctctcaaaagggggagaactggatcttgcaaaagcctcccggcttctgatcgatgatttccgaaacgggaagctggggaaaatcaccctggaactgccgccggaatgcccttccgggaatacgaacgtggagcagacttgcgatgagaaagttaagtgaggagaaactggctgccgagcgggagcgcttagagcagatgaaaagctatgaaaggcagtacggggatcatatccttgtctgcgggattgatgaggcgggcagaggccctcttgccggcccggtggtggccggtgcggtgattcttccaggagactgcgagatcctgtttttaaacgattcgaagaagctgtcagagaagaggcgcgaggaactgtttctggagatccaggagaaagcggtgagctttgcggtaggagtagtgggcccggagcggattgatgagatcaatattcttcaggccacctatgaggccatgcgcctggcagtcagtcagctgacgaatccgccgcaggtgcttttaaacgatgcagtgaccattccgggactggatattttgcaggttccgattatcaagggagatgcgaagagcgtttccatagcggcgggcagcattatggcgaaggttacgagggatcatatgatggtggagtacgacaagctgttccctgagtacggctttgcgaagcataaaggctacgggacggcggcgcacatcgcggcgcttaaggagtttggcccctgcgccattcaccggaggagttttatcaggaattttgtggattgacggggaagtgaatgaataagcatgagatcggcagcggctatgaagagatggcggctgcctatttgatagaacaggggtataaaataattgccagaaatttttcggaccggcgcggagagatcgatatcattgcgagagacggggagtatttggtcttcgtcgaggtgaagtaccggagagatgaaaagcagggcaatccggcagaagcggtggacttaagaaaacaacagcacatccgtcatgccgcagaatactatttatacaaaaacagagtcagcgacaccatgccgtgccggtttgatgttgtcgccatactcggagaccggatcacgctgatccgtgacgctttttgacgcttcgctgtcagtggaggggcgtcttaccggcgctgtgattcatgcgcggactgtgcaggtgattgtttcaaaggaggtttgacgatgagagatatatggaagcggaaacaggagatggcggtgctcgattaccggacagccaacggcgttccgtatctggcctttccggctctggagaggaccggaatcgtgtgccacgggttttccactcgcatgggaggcgtgagcaccggcgtgtattctaccatgaatttcgcgtttttaaaaggggatgatccggaccatgtacgggagaattaccgcaggatggcgaaggcgatcggagtggatgaagagaaaatggtgctgtcctggcagactcacacgaccaatatccgcaaggtgacggaagatgacgcaggaaaagggattaccagagaacgggattatcaggatattgacggcctgatcacggatgtgcccggcctgacgcttgtgacgttttatgcagactgcgtgccgctgtacttcctcgatccggttcggcgcgccgtgggcttaagccactctggctggagaggtaccgtgggccgtatggggcaggcaacggtagaggccatgggccgggagtacggttcgaacccgggggatatcatcgcctgcatcggtcccagtatctgtcaggactgctacgaggtgggagaggaagtggctgcggaatttcgccgggcattttcggaaaaatactggccggaactgctgtgtgcgaagccagagggaaagtacctgctgaacctgtggcgtgcaaatgagattgttctcctggaggcgggtgtaaaagcagaaaatatccaggtcaccgatatctgtacgcactgtaatccggactatttattttcccacaggacgatggggagcgagagaggaaacttagcggcatttctttcgataaaagaattgtaagaataaagagtccggttcgccggattcccgcgccggagtgctgctgcttcagcaaccatactttctcagcgcggagtgcacctcctgcccgggggatttttatgcaataggagtactttcctattacacaaaaaactccctccttaccggctgcggactggtggagggagttttgttatggcttttttctctctgcaggctgtttcccaaacagtgcctacaggatcgtctgatagtaatcgtatccgtcgctgtggcgtttcttgagaagattctgtatcttctcggtgggtgaaagcgcggtgctgatcgagacatcatggtttaaggaattgataatggcggcgatatatttactgatatcggcttccacataccattcgcggctcagaagctcctttggacggtagtttaagttggtcgtcaccaccaggtcgatgtattcctttgcgtagtattcgtcaaacttgtccagaccgttcgtaaagagtccgaaggtacagcagacgatgactttttccacgccccgctcctttaactctttggctgtgtccagcatgctctcgccggaggatatcatgtcatccacgatcagtacggtcttgccttccacggaggatcccaggaattcatgagccacgatgggattgcgtccgcccacgactctggagtagtcccgccgcttatagaacatacccatatcaacactcaagttgttggccagatagacagcgcggtccatggcgccctcatccgggctgataaccatgagatgatccttatcgataggcagattcggatagtggcgcaaaaatgcctttacaaactggtaggtcggcatgaaattgtcaaaaccgtgaagcggaatcgcattctgtacgcgcgggtcatgagcgtcgaaggttatgatgttgctgactcccatggaggtcagctcttccaaagccatggcgcagtcgagtgattcacgcttgcttctcttatgctggcggctctcatagagaaagggcatgatgacattgacccggtgggccgtcgccgagcaggcgcctatgattctttttaaatcctggaaatggtcgtccggagacatatggttggtataaccattgacggtataggatatgctgtaattagtgatgtccaccatcgcaaaaatatcggttcctctgacggactctttgatgattcctttcgcctcaccgcttccgaaacgggggcagctgcagtttagaagataagaatcgacatcgtatccgcggtagtggagatcggcctcgcgccgctttaattcttcgatatcgtttcgacgaaaacctacaatatggtcgttgactttttctgccagctcccggcagctctccagtgccgcgatctttagcggtgcaaccggcagctggtcattaaatacataatcatttgccatgatagtgaaatcctccataaattaataacaggcagtcccgtaagactgcccagttctaatcttacatccatttataccattcttcgacataaggcgtcaatagcatttccaacatttcatggaaaaaaacaaaaaagggtttctttacaaagattgataatattgttatgatagagaagataaaacagaagggaaattacagaaaatatgagcagaaaaggtcataaaattaaggctgtggatcccggatccatcgcagaggcgctggaactggagccgggcgactgggtattgtcgatagacggccatgagctggaagacattttcgattatgaatattacatcaacagtgagtccatcgttatggaggtcagaaaggccaatggtgaagagtgggagctggaaatagagaacggatacgaagatccgggaattaccttcgagaacggtctgatgagcgaataccgttcctgccgcaatcaatgcgttttctgtttcatcgaccagatgccgccgggaatgcgggagacgctgtactttaaggacgacgatacgagactgtcatttttacagggaaattacgtgacgctgaccaacttaagcgattacgatgtggagcgcatcatcaagtttaagctggcccccatcaacatatcggtacagacgacgaatcccgagctccgatgcaagatgcttcataaccggtttgcaggacaggcattaaaacggattgatgagctctataaagcgggagttccgatgaacggccagatcgttttatgtaaggggttaaacgatggggtagagttagagcggacgatacgtgatttatcgaagtatctgccttatatggagagcgtttccgtggtaccggtcggactctccaagttccgtgacggactctatcccctacagccaatcgggaaagaggaggccgttaaaaccattgatttgatcgagcggtggcagaaaaagctttatgaagagcatggaactcattttatccatgccagcgacgagttctatattctcgcaggccgtccgctgccggaggaagagcggtatgacgggtacattcagctggaaaacggtgttggaatgctgagactgctggaagaagaggtggagtcctcgcttggagcactggagggagacggccgggaagaagagatatccatcgccacagggctgctggctgctccgtttatcgaacgccatgtaaataccatccgcaggaaattcccgaactgcacgattcatgtgtatccgatcaggaattacttcttcggggagcagatcaccgtggccgggctgatcaccggtcaggacctgatcgcccagcttgagggaaagcctcttggctcgagactgctgcttccggagtgtatgttccgcagcggagaagaggtgttcctggacgatattacccgcggcgaagtacaaaaagctttacaagtaaaggtagatattgtaaaatcaagcggtcaggatcttgtacaggccgtacttcatcctgtggaagagggaagcccttcctatgaaggatatgagttaaaggagatatcatatgagtaaaccagttgttgccatcgtgggccgtcccaatgtcgggaagtctacgctgtttaatgtattagccggagacacgatctccattgttaaggatactccgggggtgacgagagacagaatttatgccgactgtacgtggctggacaagaatttcaccctgatcgacacaggcggaatcgaaccggacagcagtgacatcatcctgtcccagatgagagagcaggcggagattgccatcgcaaccgcggatgtcatcgtctttatcgtggacgtgcgccagggactggtggacgcggattccaaggttgccgacatgcttcgcaagtccaagaaaccggtcgtactggctgtcaataaggtggacagctttgaaaagttcggcaacgatgtatacgagttttataatctcggtatcggtgatccggttccggtttccgctgcttccagacttggtctgggcgagctgctcgatgaggtaatcaaatacttcggcgagggcaccggagaggaaacggaggatgaccggccgagaatcgccatcgtcggaaagcccaatgttggcaaatcttccattatcaatcaactggtgggagagaaccgcgtgatcgtatccgatatcgcgggaacgacaagggatgcggtggatacggagatcgtccataacggaacagagtacgtttttatcgatacggccggacttcgccggaagagcaaaattaaggaggaactggagcgctacagcattatccgtacagtgacggccgtggaacgcgcggatgtggtggtggtggtgatcgatgccaccgagggcgtgacggaacaggatgccaagatcgccggcattgcccacgagcgcggaaaaggaatcattgtagccgtgaacaaatgggatgccattgaaaaaaatgacaagactatttacgaatacaccaataagattaaggatacgctggcatttatgccgtatgcggagtatgtgtttatttcggcaaagacagggcagaggacgaaccgcctgtttgaattgattgacatggtgagacagaatcagacgctccgcgtcgccacgggtgtgctaaatgagattatgacggaagcggtggccttacagcagccgccgtcggataagggaaaacgcttaagactctactacattacccaggtagcggtgaaaccgccgacattcgtcatctttgtcaatgacaagaatctgatgcatttctcttacacacgctatattgaaaacaagatcagggaagcctttggattcaagggaacctctctcaagtttatagccagagagcgcagtggaaaggaacagtagggtatggaaagaatcatttgtctggcggcaggctatttattcggcctgcttcagaccggctatatgtacggccggatgaataagatagacattcgtaattatggaagcggcaactcggggacgaccaatgcgctccgcgtgctggggatgaaggcgggagcgattgtctttttcggagattttttgaaagcgtttatcccctgtgtccttgttcggattctttttaaagaccagccggagaccgcctttctgctggtgctctataccggccttggcgttattttgggacataactatccattctatctgaatttcaagggtggaaagggaatcgcggctacggccggtctcattgtggccctggacttacggctgatggtggtgacgcttgtggcctttgtcctgattgtggcggtgacgagatttgtttcgctgggatcgctggttgtggccacgatttttcttgcgtggatgattgtcatgggaagtaacggcagctacggtgtctcagcaggacatctccccgagttttacatcgttgcggcagtgatcagcgcccaggcattctggcgccacagagcgaatatcgtaagactggttcatggaaatgaaaacaaaataagttttggcaaaaaataagaatgaggtgaaggttcatggcaaagattgggattgtcgggtcaggaagctggggaatcgctttggcggttcttctgtataacaatggtcattcagtatccgtgtggtcggcgctgccggaggaaatcacggagatgaagacgactgggcgccatcacactctgccggatctggttcttccggatggtatgatgtttacagagagccttgaggaggtcatggaggacaaggaagtgctggttaccgccgttccgtccgtctatgtccgttctacggctcagaagatgaagccttactgcagagaaggacagataattgtaaatgtggcaaagggaatcgaggagtcgacgcttaagacgctttccgagattctggaagacgagctccccatggcggatgtcgctgttttatcgggccccagccatgcggaagaggtgagcaggggacttcccaccacctgtgtcgcgggcgcgcacagcaggaagaccgctgagtacattcagtccgtctttatgagtgaggtattccgcgtctataccagcccggacatgcagggcatcgaactgggcggatcccttaaaaatgtcatcgccctggctgccggtattgcagacggactgggatacggcgacaatacgaaggctgcgctgatcacacgcggaatcgcggagattgccaggctgggaacggccatgggaggaaagttccagaccttctgcggtctttcgggaatcggcgatctgatcgttacctgcgccagtatgcacagccggaaccgccgcgccggaatcctgattggaaaaggatattccatggaggaggccatgaaggaagtaaagatggtggtggaaggcgtttattccgcaaaggctgcgctgcagctttcagaaaaatatgggattgacatgccgattgtggaacaggttaatgcaatattattcgatcataaaccggcatcggaggctgtaaaaggcctgatgctgcgggataaaacgatagagagctccgaccttccgtggtaaaatatggatggatgattgaattttgaaagaaataccggaaattagttgacattttaaaaaagccatcttattatagagactatgtatatatagtcacaggaactgtatatatgaattttaaaaggtagcaaagctatcaaaccatacggagtgctgtacggactcggtatgtgaagtgaaacaagaggaggaatgaattatgaaaacaacaaagaagttggtaagccttggccttgttgctgttatggctgcatccttaactgcatgcggcggcaagagtgacaatggcacaacaacggcaggaacagctgaaaccacagctgcagcagatgccggagcagctgagcagaccgcaggcggttcctttaagcttggcggcatcggaccgatcaccggagcaaccgcaatctacggacaggccgttatgaacggcgctgaactggcgattaatgagattaatgcggccggcggtatcggaggagtacagatcgagtataatttccaggacgatgagaacgacacggaaaaagcagtcaatgcttacaacacgttaaaggactggggtatgcagatgttagtcggtacggttacttccgcaccgtgtatcgcagtcggttcagagtccagcaacgacaacatgttccagctgacaccatccggttctgctgtggactgcgcaaagtttgacaaccagttccgtatctgcttctctgatccgaaccagggtgctgcttccgcacagtacatcggtgagaacaagctggctactaaagtagcgattatctacgacagttctgatgtttattcatccggtattcacgacaaattcatcgcagaagctgcgaaccagggctttgaagtggtagctgacgaagcgtttaccgctgacaataacacgaacttctccgtacagattcagaaggcacaggacgccggtgcagaactggtattccttccaatctactatcagcaggcatccttaattctggtgcaggcaaagcagatgggatacgaaccggaattctttggctgtgacggtctggatggccttttaacggtagagaacttcgatacatcactggcagaaggcattatgctgctgacaccattcgctgcagatgcacaggatgacttaacaaagaacttcgttactacatataaagagaaatacggcgatacgccgaaccagttcgctgctgacgcttacgatgcagtttatgcaatcaaggcggccgcagaaaaggcaggtatcactcctgatatggatgcatctacgatctgcgataagttaaagaccgccatgacagaggtctctgtagacggattaacaggttcaaacatgaagtggaccgctgacggcgagccggagaaggctccgaaggctgtaaagattgtagacggcgtatacaatgcaatgtaagtttatcaggtacatattgcttggtatatgacccaatagagggtcgtccagaggacgaccctcttcttttcaaatctaatacccgcggcagtacccgatatagcagggcatgcaatcgccggctggacgcgcgctgtgtctgtctgccttgctgctcgcgggaataaacaacgaatgaggtgcgatgatatgatgagtttcatatcctattttattaatggtctaagcctgggcagtgtatatgccatcattgcgctgggatacaccatggtatatggtatcgccaagatgctgaatttcgctcacggcgatgtcatcatgatcggaggatacgtggtattcaccgttgtcagcacgatggggcttccaccgcttgccggcattcttcttgctgtcatcatatgtacggttctcggtgtcaccattgagaaggtcgcatacagacctctccgtatggcttcacctctggctgtcttaattacagcaatcggtgtcagctacttacttcagaacatcgcgctgctggtttttggatccaatccgaagtcctttacatcagttgttacgattccggctttgaagcttgcaggagggagactgacgatttcaggggaaacgctggttaccatcgtttcctgtatcgtgattatggtggtactgactaccttcatcaagaaaacgaaggcagggcaggccatgctggctgtatccgaagataagggagcagcccagctgatggggatcaatgtggatggaacgatcgcgctgacttttgccatcggttccgcattagccgccattgcgggtaccttactctgttccgcatatccgaccctgacgccgtacaccggctccatgccgggaatcaaggccttcgtcgccgctgtattcggcggtatcggctccattccgggtgcgtttatcggcggtctgttactgggcgtgattgagaacttaagcaaggcctatatttcttcccagctttccgacgccattgttttcgcagtcctgatcattgtgcttcttgtaaagcctaccggtattctgggcaagaagattaacgagaaagtgtaggtgcgggtcatgggaaaaagtggaaagacgaaaagtctgcagataaataaaacaacaagaagcaatttgattacatacggtatcgtcatcgcagcctatattatagtagagatcctgatcagcggggggcacatgagcagcctgatgaagggccttctggtacctctctgcatctatacgatcatggctgtctccctgaatttaacggtaggcatcctgggcgagctgagcctgggacacgccggttttatgtgcgtgggagcatttgccagctccttattttccatctgtatgctggatacgattcccagtgcaggaatccgttttacgctggcaatcctggtaggcgccgcggccgcggctgcagccggcattgtcgtaggaattccggtgctgaggctgagaggcgactatctggccatagttacgctggcattcggtgagattattaagaatgtggtcaatgtcatctatctgggaaaggacagcaacggcattcatgtctccataaaaaatgccatggcgcttcagatgcaggaagatggtcagataattatgaacggcgcccagggaatcaacggaacgccgaaaaacgccacatttacggtggggatcattctgattctgctcacactgtttatcgtcctgaatctgattcattccagatccggccgcgccatcatgtcggtgcgtgacaaccggattgcggcggaatccatcggtatcaacatcacaaagtataaactgatggcgtttaccatatccgcttccttagccggtgttgcgggcgttctttattcccataacttatctgctctgacggcgacacagaagaatttcggatacaatcagtccattatgattctggtattcgttgtgctgggcggaatcggcaacatccgcggatccatgattgccgcagtgattctgactctgctcccggagatgctccgcggactcaatacgtaccgtatgctgatttacgcaattattctgattgtcatgatgattttcaactggagtccgaaatttatcgatttcagaaaacgtcactctctgaaacggtattttcataagaacacggcagataaggaggtttcataagcatggcattacttgaaattaaaaacctcggcatctctttcggtggactgcgcgccgtggatgatttcagcattaccattgagaaaggccagctctacggactgatcggccctaacggcgccggtaagacgacgatattcaacctgttgaccggtgtgtataagcctaatatgggtacgatccacttggatggaatgaacatcacagggaagaagaccatggagatcaaccgcgcgggtgtcgccagaaccttccagaatatccgtctgtttaaggagctgactgtgctcgacaacgtgaaggcgggtcttcacaatcagtattcctattctgccatagccggaattctgcgtcttcccaagtattttaaggtggagaagacgatggacgagaaggcggtagaacttctgaaggtctttgatctggaccgggaaaaggatactctggcctccaatctgccatacggcaaacagcggaagctggagattgcccgggcactggcaacgaatccgaagcttctgcttctcgatgagccggcggccggcatgaatcccaacgagacgaaggaactgatggacaccatccggtttgtacgcgataatttcgatatgacgattcttctgatcgagcatgatatgaaacttgtttccggtatctgtgagaagctgactgtgttaaactttggtcaggtgctcgcccagggcaatacggcggatgtgttaaatgacccggaggtcatcaaggcatatctcggagaataggaggagacgggcatggcaatactggaagttaaaaatctggaagtgtattacggcgtcatcaaggcgctgaaaggaatatcctttgaagtaaatgaaggggagattgtagccttaatcggagccaacggcgcgggcaaaacgacgacgctgcatacgatcaccggtctgttaaaagcggccggcggttcgatcggctttaatggctgcgatattacaaaggtccggggcgacaggattgtcggaatgggaatggctcacgttcccgagggcagacgtgtgtttgcagatctgaccgtattcgagaacctgaagctgggagcttatacgaggaaagacaagacggagatcgaggagacgctgcagatgatctataagcgctttccgagactgctggagcgcaggaaccagccggccggaaccttgagcggcggagaacagcagatgctggccatgggacgagcactgatgtcgcatccgaagctgattgtcatggatgagccgtccatgggcttgtctccaatctatgtcaatgaaatcttcgatatcattcaggagatcaacaagtccggaaccacggtgcttttagtggagcagaatgcgaaaaaggcgctttctatcgcaaacagggcctacgtgttggagacgggagatatcgttctgagcggagatgcgaaggaactgatgaatgatgattcggtgaagaaggcttatttaagtgagtaggaagttggagcggccaatgagcagattatgggataacagattgatgaaaaacagattcggacaggtgcggtcagggtggattatcctgattacaatggctgtttactatattctggctcttgtctccggcaatctgatcatagagctgctgagaaagattttgattgccacaggcgacatcaatccggtaaccggagagttttccagcgtggtagaatggttcgataacatctttctgcccgtcgcgtttcagatacttacagaacttcttatgcttgcagttccaattaccatatggcgattggggatgaaacattcggtccgggagatgggactggattctttaaagggtaagaagaggagaaaagacggggctgcaggtatgctgctgggaattttaaactgctctgttatctttcttttggttcttatgataggaaagggccgcgttgtatcaaacggaattacagtttcgggactgaccttctggtggctgcttacttttgttttggtggggatcgcggaggaaacgttgaatcgcggctttttaatggctgttctgcgtcggtgccgcaatgtccctgtcattatgtttgttccgtctgtgatttttggactgattcatttgagtaatccgggagtaacatttttttccgtctttaacattatacttgtcgggatacttttttcctatatgtttctaaagtcgggttccatatggatgtgtattggatatcatattacctggaatatctttcagggggtggtctatggaatgcctgtcagcggcctccagattcctggcatcattacaacgcaatatgcggaaagcaatctgctgaacggaggtgcctttggaatcgagggtggcatactgaccaccatagtgactttgctcagctttatatttgtatggtattattaccggaattcaaactacgatttcttaagcgattcagagaagccggaagtgcttcaatgactcatgcagagaaagccccagggacggaagaacctggggctttcccaatggtgggaagattgagggcatcaaataatcttaaacagacttgctggaatattaagtgatcccctgcatatattataacagcacagaagggggtatctttatggacaattttgatgtatacagtgatattaaagcccggaccaatggagagatttatataggcgtagtcggaccggtgcggacgggaaaatccacctttatcaaacggtttatggaactgatggtgctgccggaaatggtggatgagcatcagaaaacgcagacgagagatgaacttccgcagagcgcggccgggaagacgatcatgacgacggaaccgaaatttataccgaaggaggcggcggaaatccggctgggtgaggagatcgagacgaaggtccggctcatcgactgcgtgggatttatggtggaaggcgcagccggacacatcgaaaatgatgaagaacgacttgtaaagactccatggtttgactatgagattccctttacaaaggccgcagagatcggaacgaggaaggtcataaacgaccactccaccatcggcgtcgttatcacgacggatggtaccatcggggaactgaaacgccccaactacatagccgcggaagagcggaccatcacagaactgaaggaactcggaaagccgttcatcgtgcttttaaactccgtaaaaccgtattccgatgagactgcggctcttgcgaaggagatgagggaaaaatacgatgtgaccgttatgccggtgaactgcgagcagctgaaaaaggacgatgtctaccatatactggaacgcgtgctgaaggaatttccggttacggagatggatttctatattcccaaatggctggagattcttcctgcaagccactggctgaaatcacagattatccaggccgccaaggacatggtgaaaaaggttacccatatgaaggatatcacctccgatctgttcgacggcgcaattgagagtatccgggccgtaaaagtacagaatatgaacatggcggatggaagtgtctccatgggtatggatgtggatgacagctattattatcagatcctaagcgactacgtgggaattcccatcgaaggagaataccagctgatgcagaccttaagcgatcttgcaaagatgcgtgcggagtatgaaaaagtgaacaatgccatgagccaggttcgcttaaaaggatatggtgttgtgacgccggaacgttcggaaatcatcctcgatgagccggaagtgattaaacacggcaacaaatacggggtcaagatgcgggcggaggccccctccatcaatctgatcaaggcccatatccagacagagatcgcaccgattgtaggcagtgaacagcaggcagaggacttgattgcctacatcaaggaaaatgccagagagagcgaggaaggcatctggaacaccaatatttttggaaagtccatcgagcagattgtggaggacggtatatccgccaaagtctcccagcttacggaggactgtcagctgaagcttcaggatacgcttcagaagatcatcaacgacagcaacggaggaatgatctgcattatcatataaattcaccgggaacggcagaacaggagaatgaggcctttcatgaggtttgagtttatgctataataggaaaatgaccgacagaagaaaaataaggagggctttcaatgaaattaatgttcatcggcgcggaccatgaggtaaccggcagctgccattatttagaagccgcagggcttaagattctggtggactgcggtatgaagcagggtgtggactattttgagaatgcggagcttccggtgagctattcggagatcgattatgtgcttctgactcatgcccatatcgaccatgcagggatgcttccttttatctatgcgagaggattccgaggggaaattatcaccaccgaagccacggcggatttgtgcaatatcatgctgaaggacagcgcgcatatccaggaatcagaggcggagtggaagaacaggaaggccagacgagccgggcggcaggaagaagtgccgctatatgaaatgaatgatgcattgggggtattaaagcagtttaacccctgcagttatgatgaaataataaaactggaggagggccttaccattcggtttaccgatgtcggacatttactggggtctgcttccatcgaggtatggatcaaagagaatgatatttcgaagaaaatcgtattttccggtgatatcggcaataagaataagccgctgatccgggatccccagtatatcaaaaatgcggattacgtagtgatggagtgcacctatggcgaccggcttcacggccagataccggatcacgtctccattctcgcggatatcgtccagagaaccctggaccggggcggcaatgtggtgattcctgcatttgccgtgggcagaacgcaggaacttctctacatgttccggatcatcaaagcggagcatatggtgaaggggcacgacggattcgaggtctatgtcgacagtcctcttgccgttgaggcgaccagtgtgtttaaggataatctggtggactgttatgacgaggagacgaaggcgcttgtgacgcaggggatcaacccgatctcgtttccggggctgaagctctccattaccagtgcggaatcgagagatatcaatttcgacacaaaaccgaaggtcatcatctccgcggcaggcatgtgcgatgcgggccggatcaggcaccatttaaagcataatctgtggcggcctgaatgtaccatcgtctttacggggtatcagtccataggaacgctgggcagaagccttttggaaggcggccgggaggtgaggctgttcggagaaaccattcaggtagaggcccacattgagaagatggatggaatgagtgcccatgcagatatggaagggctgattcagtggctgaacgcattcgaggagaagccccgggaagtatttctggtacatgggaatgatgaggtgtgcgattcgttcgggaatcttttaaaagaagagtatggatatcaggcggatgcgccgtattcaggatctgtatacgacttagcggccggcagatggctggagcagagagccggagtagttgtgacgaagacggtggagacggcgaagcgtgcggttggcgtctatgcacgtctgctggctgcaggagaacgcctgctgtcggtgatccgccataacgaaggcggagccaacaaggatctggctaaattcgcggaccagatcaattcattatgcgataaatgggacagataacgagccactccaccaggtctgtgagggacttaaaccaggtggaggtgacatacatcgcacggaagcggcaaataacgtccgctgagtgcttatagccaggagaatgacataagatgggaaaagtactattgtttacagatggagctgcaagaggaaatccggacggacccggtggttacggagctgtacttcagttcacggattccaaagggcagctccatgaaaagacgctgtcggccggttatgtgaggacgaccaacaaccgtatggagctgatggccgcaatcgcagggctggaggcgctgaacaggccctgcgaggtggaactgtattcagattccaagtatgtaacggatgccttcaaccagcactggatcgacaactgggtgaagaacaactggaagcgcggcaagagcggtccggtcaagaatatcgatctgtggaaacggcttttaaaagccatggaacctcaccgcgttaccttctgctgggtaaaaggacatgccgggcatccggagaatgagcggtgcgatcagctagctaccactgccgcggatggagacagcttactggtggatgaaggcctgtaaaacttacgtatctcttacaatctcttactaattaacgaaccctatttcctttcttttttatttatgatatggtaattttatcaaagtatgttaggatgataatcatgaataaaaataaaggaatctggcttgtgatcgctgccatcctgctgatcgggatcgcggtaacgtttgcaaccagcagatttatccggcagaacggcggttcactggacaccgtggcggtgacgcagatgccggtgacggcgggcggaggaataccgcaggcctattcggagggagcaggagcggagactcccgcagcggccaaaaagcgtatggcggcggctcccatagaggaggaagatgcggcaccgggtaacacgggagaggcggctgaccaggcggcagttccggaacctgcgtcctcccggatcatggcggcagaaggggcggcggcgccggctcctgaatcatttctgatggattcagacgaggctgcaggagaagctgcagtcccggagacagcagcggccggaccgggaagcagggaggatgcggcggctgtcccatccatctccccgttaggaccgggcggaagcgcatcgcttcagaatgacgaggaagaaaaactggtatattacgaaagacgcctggcggaattagatgcccaggttcagaagatgcgcagtgagtcctccgattccacgacgtattccatgaagacgctggctgaaaaggaactccggctctggaacatcgagatgaacaccatctatgcggatatcatagacggcctggacgaggaagccaggagtaagctggaaggcgaacagcagacctggacgaagagccgggatacaaaggcggaggaggcagcgaggaagtacagcggcggctctctggagggtgtagagtatacggcttcccaggcggaatccacgagaacgaggacatacgatctcgtagagacatatattcaggctctgcctgcggaaaatgaagattaaaagaaaatggcagtccccatacggaacaggagtaactgttttgtgaagggactgcttttttgcatatggaatgacgtggatttcggaaataacacagaaaatcggcggcaacatcttgattaataaaaagtgatatgataggatattaaaatgagcataactatagcaatcagtcaggagggttgaatctatgacagcaattttagcaagttttctgcagacggcaatcaagtttctgtttttccttgcagtggcgtggggaggaatcgtgtgcggcaagaaattcagagattataaggatgccaagaatgcaggcagtatgacagaagaaagtaaataactaacggaggacagtaacgtgaacaagacaggtgtgaatgaactgaggagaatgttccttgaattttttgagagcaagggacatctggcgatgaaaagcttctccctggttccgcataatgataacagcttattgttaatcaactcaggtatggcgcctttaaagccgtattttacaggacaggagataccgccgagaaagcgtgtgacaacctgtcagaagtgtatcagaaccggagatatcgagaatgtgggaaagaccgcccgtcacggcaccttctttgagatgctgggcaatttctcctttggagattattttaagacggaagcgatccgctggtcctgggagtttttgacagaggttgtgggactggatccggacaggttatatccatccgtctatttagaagacgatgaggctttcgatatctggaataaggaaatcggcattgcaccggaacgcatcttccgcttcggcaaggaagataacttctgggagcatggagcaggaccctgcggaccgtgttctgaaatctattatgaccgcggagagaagtacggctgcggaaagccgggctgcaccgtgggctgtgaatgtgaccgttacatggaagtttggaataacgtatttacccagttcgagaacgacggacacggcaattacgaggaactggcccagaagaatatcgataccggcatggggctcgaacgtctggcggtggtggttcaggatgtggattccatctttgatgttgacaccataaaggctctgttaaacagggttgcagagcttgcccgcacggaatatcagaaggatgcgtcggttgacgtttcccttcgtctgattacagaccatgtccgctcctgtacctttatgatttccgacggcatcatgccatccaacgaaggacgcggatacgtgctgcgccgtctgctccggagagcggcccgccatggaaggcttctcggcatcgagggaagattcctcgcagagctttccaggactgtgattgagctttccaaagacggatatccggaactggaagagaagaaagccatgattttaaaggttctgaccgaggaagaggataaattcaaccggaccatcgatcaggggcttgcgattctaagtgagatggaagaacagatgtctgccgcaggaaagacggtactgagcggtgaggatgcattcaagctctatgatacttacggcttcccgctggatttgacgagagaaattctggaagaaaagcacttttcaatcgatgaggacggctttaagaaggccatgcaggaacagcgggagaaggccagagcggccagaaaaaccacgaactacatgggtgctgacgtgactgtttaccagtccatcgatcctgcgctcaccacggaatttgtcggatacgacagacttgtctgtgattctaagattaccgcgctgacgacggagactgacctggtggaggcgctgacggacggagagaccggcacgattgtgacggaggagacctgcttttacggcaccatgggcggccagcagggcgacaagggtgtcattgtcagtgcaaacggcgagttttcggtggaggacaccattcatctgcagggcggcaaggtcggccatgtgggaaagatgaagaagggcatgttccagatcggtgatgtggttaccttaaaggtctgtgaagagagccgtatgaatacaggtaagaaccacagtgcgactcatctgcttcagaaggcgctccgtaccgttttaggcgagcatgtggagcaggcaggctcctatgtggatgaagacaggcttcgtttcgacttcactcatttctccgccatgacgccggaagagattaagaaggtggaatgccttgtcaatgagaagattaaggaagcgctgaatgtaaagacagaggttatgagccttgacgaggcgaagaagtcgggcgccatggcattgtttggtgaaaaatacggggagaatgtccgcgtggtaaagatgggcgatttctccacggagctttgcggtggtacccatatctctaatacaggcgttatcggttcctttaaaatcttgtcagagaccggtattgcagccggtgtgcgcagaattgaggcgctgacgggtgacggcctgatgaagtactatcaggaggccgagaccgagcttcacgaggcggcgaaggcggcgaaggccacgcctcagacactggcagccaggattgaagccatgcttgaggagatcaagacgcttcattctgaaaatgagaagttaaagagcagactggccaaggactccctgggggatgtgatggaccaggtgaaggagatcggcggtgttaaggttctggctgcgaaggctgacgatgtggacatgaacggcttaagaaacttgggagaccagttaaaggataagctgggtgaaggcgtgattgtgctggcttctgttctggacggaaaagtgaacttaatggcaaccgctacagaggaagcgcagaaaaagggcgcccatgcaggcaacttaatcaaggctgtcgcaggactcgttggcggaggcggcggcggaaggccgaatatggcccaggccggcggcaagaatccggccggagtagacgcatgtctggaagaggtttataaagtagttgaaggccagctgaaataaggcataaattttccggtaaaaaattaaaaatttccttgacgaatgggaaaattatgctataatcatatcagtgctataaaatacccaaacagttgtattatgcacaagtacacaactggagggaggttaggtgtgagctatgtcaaatgtaatcgttaaagacaacgagagcttagatagcgctttacgcagattcaaaagaaactgtgcgaaagcaggtatccagcaggaaattcgtaagagagagcattacgaaaagccaagcgtaagacgtaagaaaaagtctgaagctgcaagaaaacgtaaatataactaattactgattagtcaaacaaggtgagtccctggtcattttatgatcagggatttctttgcttttcggaagctttatgggaggaccggctgtaccggatggccggcttctgcggttatccgggtgttttgatggttaacctgcataatcggacggcgtttttgcatatagtataatatcattggctgaaaggcagaaacgatatgtttgaagagatgaagtttcgtgcggcggagaacttgaagcttccaaaggatgtggttctgggggaagtgctggtatcttttctgggccgccacagtgttgtaattgaaaattaccgcggcatcattctctatactgataccctgatcaagctccaggccaagacgtgccgcgtggctgtatcgggaagccgccttgtgattgaatattatacgaatgaggagatgaagattaacgggctcattaagtccatggaatttgaataaagaggaaaactgaaggaggaggtacaaccgtgattgtaacatggcttaaccaccggatatccggttatctgtttgtggagatgacgggcttttctccggaacggttctttaatatgtgcagcgttcatgaaatagaaatctggggagtgtcggacaccggccgttcctgccgtttttatatgactgtgaaagggtttaagaagataaaacccattgtccggaaatcgaaggtcagacttaaggtactgggaaagtttggacttcctttttttttacacagaaacaggaagcggaagctttacgcggccggactggcatctttttttgtcctgctttacatactttccatctttatctgggatattgagtttgaggggaatcacatgtatacgtatgatacccttttgaaatactgtgaaacagaggagatccgctatggcatggtcaaatccaggatcgactgtgatgccctggaagaatcgctgcggagtgcattcccggagatcacctgggtatcggccagggtatcgggaacgcgtcttctggttaagataaaggagaacgaggttctctcggaaattcctgcaaaggatgagtctccctgcgatatcgtggcgtcaaaggatggcgtgatcacctccatgatcgtgcggcagggcgttccggcggtttcagtgggggatgaagtgaaaaagggcgacgtgcttgtcagcggaacgctgcatgtgatcggggacagcgaggagatcatgaacactcactatgttcattccgatgcggacatcacggcgcggacggaataccacatcacacggcagatcccgctgtttaaacgagtggatgtggaaaccggaaacgtacggcgggggaagtatgcaaaggtatttcagtattccctgatgctgatgcgcccgaagcaggagggaaccacctggaaggtgaccatggaagaggatcagcttcacttatttcagaatttctatctgcctgtctatctcggtgatattacggcgaaggagtacatttcctacgagcggccctacacggaagaggagaaaaaacaggcggccgatgagatcaatgagaatttgaaaaaaaaattattggaaaaaggggtacaaattctggaaaatcatgttaaaatactagataatgaatctttatgccaaattgccatcgatcttgtggctgaggaagccgtagggcagagtcagggcgtagagataccaatcacacaggaacaagaggagactgaggagtccaatgggcgtaattgagacaatcatagatataccggctgaacacgagaagaatgtctgcggacagtttgacagctatttaaagaagatagagagaactctccatgtcacgatgatcgagcgggacggcgcgctaaaaatcatcggcccggagcagatggtgcagaaggcgaagagtgtgtttaataatctgatcgagctgtcgaaacggggaaatgcgatcacggagcagaatgtggattatgccctgtctctgtccttttcggagagtgacgggcagattttagagatcgacaaggacatcatatgcagaacgattacgggaaagccggtgaagccgaagaccatgggccagaagcagtatgtggatcagatcaggaaaaagatgatcgtattcggaattggtccggccggtaccggtaagacgtatcttgccatggctatggcgattcaggcctttaaaaatggtgaggtgagcagaattattctgacgcgccctgccattgaggcgggagagaaactgggctttctgcccggcgatttacagagcaagattgacccgtacttacggcccctctatgacgcgctgtatcagattatgggcgcagagagctacttacacaatgcggagaaagggctgatcgaggtggcccccctggcctatatgaggggaagaacccttgacaatgcctatattattctggacgaggcgcagaataccacgccggcgcagatgaagatgtttttaacgagaatcggtttcgggtccaaggttattgttaccggggaccagacgcagaaggacttgcctgccggggccgtgtccggccttgacaccgcagtccgcgtgttaaaaaggattgacgacatcgggttctgctacttaagcagcagtgatgtggtgcgtcatccgctggttcagaaaatagtacaggcttacgacgattacgagacaaagaaaaagaccggagagaaagaacgaaagacggcaaaagccccgggaggcagaaagggacgctatgacgattcatattgagtatgagacggaagaggagttaaagcttccgtatgaggagattatcaccacagtggtgaacgaggcactggactatgagaactgtccttatgaggcggaggtgaatgtgctccttacggataatgaggatatccggcagatcaataaagaataccgtgatattgacaatgctaccgatgtgctgtcgtttccaatggccgattacgacagtccgtcggattttgaccgtctcgaggacatggcaagcgattactttaacccggagaccggggaactgctgctgggggacattgtcatatctgtcgataaggtgaaggaacaggcggagaagtacggccattccgagacgagagaactggcttttctggtggcgcacagcatgcttcatctgtgcggctacgaccatatggtggatgaggagcgtctcgtcatggagaagaagcaggaagagattctgaaacgagggggatacgaacgatgaaaaaacgggcatggttctgtgcggccgggctaatccttttgatgggcgccgtgaccggatgccagggaaaatatcaggaggtggctgtgacggacgcctctgtagagacggacaccacgcccgcccctacgaaagagattaagatagagacgacaacggaggcacctgacggggaggaagtggaatccggcgactggtatacttataaagagcgcaccgagcaggatggaaagatcaggagttatctgaccggcaggatggtggatgcggcgattggaaaccgccggcccatagcgattatgatgagcaacgacaaggcggcgctgccgcagtacggcatcaatcgtgcggatatcgtgtatgaggcccctgtagagggcggcatgaaccgatatatggctattatcgaggattacgacgatctggacaggatcggttccgtgagaagctgccggacgtattatacatactttgcccgtgagtttgacgccatttacgctcattacggacagagtacctttgccaagccgtatctggccaacgtggacaatatcaacggactggacgggatcggcaccgtggcgtattacaggacgaaagaccgtaaatcacctcacaacgcatattccagcggagaaaggctgaataaggcgatagcccagctggggtattccgagagctacagtgcggattacaagggccattaccgctttgcgaaaacgggccatgaggtgacgctggacggtgcgcccagtgtcatggacgcggccagggtctatcccggctacgtgatgaataagccgtggtttgaatataacgagagcgatggcttatactaccggtatcagtacggagcgcctcataagggcgacgaaggtccgattgccgtaaagaatattctgttccagtactgcccgtcgggccactatgccaccacggattatctggatatcaatgtccatgacgattcctacggactctacgccacagagggaaaggcgattccggtgaaatggacgaaggatggggagttcggtctgacacattattacgacatggagaataacgaggtaatcctcaatcagggaaagacgtggatatgcgtgatttccgcacaggattcctcaaatgtagaggtttatggaaaataacaggacaagcagaagcagaaaaaagcctgagaaaaagggcgcgtcaaattttattatacagggaacgattcttgcggcggcggggatcattgtgcgcctgatcgggatgctgtatcggattccccttgccaatatactgggggatgaagggaacgggtactacagttcggcttttaccatctattcgatcttattgattgtctcttcctacagccttcctacggccgtttcgaagatgattgctacgaagaatgccagaaaagagtataagaattcggtacgtattttaaaggcggctctcttttatggaacggtagttggagggattggagcggcggttttgtggtttggagccgatttctttgccacccgtttcttaaacatgccgtataccagatacgcgcttaaaacgctggcgccaactatatgggtcattgcttatctcggtgtatttcgcggatattttcagggattggggacgatgatccccaccgccctttcgcagattttcgagcagattatcaatgctattatcagtattgtagcggcggagcggttgtttcatgcgggattgaaagcaaacctggttcatgaaaccacggaattttcttttgccttcggagctgccggcggtaccatcggtacaggcgctggtgcggtggcggggcttttgttcctgctttttttaatggccagttaccggccagttatgatgagacaggcaaaacgcgaccgcaccagacggagagacagttacggtgagatatccgctgtcctgctgatgacagttcttcctattgttatgagcagcgtagcttataacatcagtacggttattgataacagcatctatggaaaaggaatggcatttctcgggatgggggcgtctgaggcggtttcaacctggggcgtctatgccggaaaataccacctgctgttcaatatcccggtggccattgccaattcactggcctcttccctgattccgtccctgtcgcgggcggtggccggaaaaaaccgcgggcagatcgtgagcaaggtatccatggtgattcgtttttccatggtgatagcaatcccggctacggttgggcttaccgtgcttgcagggccggtgtgcaatctgctgttcagccgttacgacaataccaatctgatccgtatgatgatgtacggttctctggctgtcgtatttttctccctgtccacggtgacaaatgccgtgcttcagggaatcaaccacatgcagacaccgcttaagaacgcagtgatttcacttgtgctccatatcattgtgctctgtgtcatgctgtttggttttaaaatgggaatttacagcgtggtctattccaacattctctttgcgctgtttatgtgtatcctgaatggaatggctattagccggtacttgaattacaggcaggagatgaagaagaccttcatcctcccgaccatcgcctccggtattatgggcggcgctgcatacggcgtttaccagctggttcacatgacgcttaagagcaacaccatcggtgtgcttcttgcgattgcggtggcggtgatcgtctacggaatcctgctgctgaagctgcgctgtgtggacgaggtggagctttccggtatgcccggcggcacgaaactggtaagaatcgcacagaaatgccatttgatgtgattaaaatgagggaagaaagcagatactatacttcgaaggaggtattatcctatgaagaagtatatgttctgctttcttttatttgcagccacttcgcttctctgcctcggaatcggcttcgtcattaccaaagacagcgtgcagccggaggaggccatacccggagcgactctggagacagagaccgtgacggaggaccagatcgtcatcaatcaggaaaaggtgtcacctgcgccggagaaggaaaaggaaaaatattatctcgtatcggaggacggttatctgcttgtcctgtatcaggatcagacgacgatctgtctgtatacccatatgccggttacggatttcccggaggaggagcggggccgtctgatggatggcatctggttctcctccatgatagaggtgtttaactatctggaatcgtatacgagctagagactgtctgaacattcagacaagctccggcataggtccggaacacagggctcatcaggaaaaaaataatacttgaattgagtggaggatgcggatacaatagggctggtaacagtacagcgaggaggaatccatgaagagaaacgtgatgatcataggcggaggcgcttccggtatgacggctgcgattgcagctgccagggagggcgcccgcgttgtgatcctggaacatacgaagagacccggaaagaagattctgtctaccgggaatggaaaatgcaacctgacaaatctggatatgagaaaagatgcctttcggggagaacatcccggatttgcatggaaggtgattgaagcagtaccggtaaaagagaccgtctcattttttgaggatctggggctggtgctgacagaccggaacggatacgtttatcctgccaccgggcaggcatcctccgtattggatgcgctccgtttcgaactggaacgtctgaaaattccggtgctctgtgaatgcgaggtgtcgggcatatcaaagaagctggaactgcgcacgacccagggggtcatgaaagcggatgcagtcatacttgcggccggttctaaggcagcgcccggaacaggatccgatggcagcggttataaactggccggaagtctggggcaccgtgtgattgagccgcttccggcgcttgtgcagttaaaatgccgcgagacgtggtataagcagtttgcaggcgtaaggacagatgcttttgtgacgctgttttgcgacggacacaagaccgcgtcagaccggggggaactgcagtttacggattacggcatttccggcatccccgtctttcaggtcagccggtttgcatcacgcgctttaaacgagggaaaaaaggtgacggtccgtctcgatctgatgccggttatggataaacaggagcttttccatttcctgacagaacgggtcagaaggctgggataccggccgggggaagaattcttaaacggcgtccttaataagaaactgcaccaggtgcttcttaagaaatccggaataccggcgggccgccggacttcggagatcacggaaaaacagctccgtgttcttacggaccggattaaggctctggaaactacggtgacaggggtgaattcgttcgatcaggcgcagatctgctgcggtggcgtcgatacgagagagataaatccctgtacaatggaatcaaaattagtcagtcagctgtttctggcgggagaaatcctggatgtggacggaatctgcggcggttataatctgcagtgggcgtggtcatcaggaattctggcgggcaggaacgcaggaagaggtcctatatgataagaatcagccagttgaaactgtctgtaaaccacagtgaggaagatttaaagaagaaggcggcaaagatgctgaagcttcagccggcggatattcgccgtataacggttataaagcagtctgtcgatgcaagaaaaaagagcagcgaagtgctgtttatctataccgttgatgtcgaaactgccagggaggacaaggtattacatagactgaacagtccgaacattgcgaaagcagaaaagaaggaataccagtttccgaagccgggaacggaacctttaaaacaccgtcccgtcatcataggaagcgggccggccggccttttctgcgcgcttatgctggcgagagctgggtatgctccccttattttcgagcgcggggagagggtagatgaaagaaaacggtcagtactgcggttctggcagggaggagagttaaacggcagctccaacgtgcagttcggtgagggcggcgcgggaactttttccgatggaaagttaaacacgctggtgaaagacccgatgctacgaaacagaaaggtgctggaggtatttgtggagttcggagcggatccttccattctttataagaataagccccatatcggaacggatgtgctcagtgtgattgtgaagaacatgagggaggagattatccggctgggaggaaccttttccttccaaagctgtgtgaccgatttttgcattgagggcgggaagttaaaagccatcaccgtaaacgggacggataaaattgagacggaggtcaccgtactggcggtggggcacagtgcgagggatacctttgagaagctgctggagagaagcgtgcccatggagaagaaagcgtttgccgtgggtctgcgtattcagcatccccagagagacatcaatattgcacagtatggtgccgcggagattgaagccctgggagcggccgattataaggtaacccatcagtgtgccaacggaagaggcgtatactccttctgtatgtgtccgggcggttacgttgtcgatgcatcctcggagcccggccgtctggccgtcaacgggatgagctaccatgcgcgggatggcgtgaatgcaaacagcgcactcattgtcaccgtcacaccccaggattttccggaggacagcccccttgcgggcatcgcttaccagcgccgtctggaggaagctgcctatcggtgcggcggggggaaaatcccggtgcagttatacggtgattttaagaagaaaaggataaccacagcctttggagaggtgacgccggcgtttgaaggtaagtatgccatggcgaacctgcgggaatttttcccggatacgctgtcggaatctctgatcgaaggagtagaggcgtttaacgggcggatcgccggcttttccagaggcgacgccattctggccggcgtggagagcaggacctcgtcgccggtacgcataccgagagacgagcggtttgagagcagcgtaaaaggcctctatccctgcggagaaggtgcgggctatgcaggcggaatcacatcggctgccatggatgggattaagacggcggaggcggttgtatcgcgttatgcgccccatcacggtatggcatgaggaaagcagctgttcagccggacgttctgcacggcatcagcgccgtttcattgacgaatggaaaaaaatgttgtaagatatgagacaaaaagactgaacgaacatgattggagacaccatgaaaaccgaagtgcgggaaaagctgaaggataaacagaggatagtcataaagatcggttcgtcttccctgacccatacgtatacgggagacttgaacctgatgaagatcgagaagctggtgcgcgtcatcagtgatttgaaaggggaagggaaatccgtggtcctggtttcatccggggcaatcgcggtgggacgccaggcgctcggccaccacacaagaccggttaccatctccgagaagcaggcgtttgcggcggtaggccaggcgcgcctgatgatggtgtaccagaagctgtttgcggagtacaaccaggtggcggcgcaggttctgctgacaaaggataccatgatcaacgacagctcccgctataacgcgcagaatacgtttgatgagctcttgaagctgggaaccataccgattgtgaatgagaacgacacggtttctacctcagagatcccttacgtcgataatttcggggataacgacaggctgtccgccatcgtagcggctctgatcggcgcggatttactcattctgctgtcggatatcgacggcctttactccgatgacccgagacagaatccgaaggcgcagtttatccgccaggtggatgagattacgccggagctcatggatatgggaaaggccacctccggcagcgatgtagggaccggagggatggcggcgaagctggcggcggcccggattgccacggacagcggctccgacatggtcatcgctaacggggatgatgtggaagtggtatcccagatcatgacgggagctgataagggcacgcttttcctggcccatcccaactttgatttcgatctgatgcactacataaataacgaatattaggaggattatccatgcagcaggaaaaaatagacagaatcaacacactctaccataaggctcaggctgtgggactttcagaggaggagaaggcagaacaggccgccctgcgaaaggaatacatcgaggcaatccgcatgagtttaagaggaaatctaaacagtatttcgattcaggaagaggacggaactataacggatctggggaaaaagcatggaaatgtcgggcaagagtgaagtcagggagtgggtaaaggagaaccgtctggctctcacacagaagcaggagctggaatggaatgatgccatctgcaaaaagattttaagcctccggaccatacggcaggcgttctgtgtctactgttacgtgtcctttcgtcacgaggcaggaaccgaaaaactgatcacgagcctgctggaaatgggaaaatacgtggcggtgccgaaggtggaaggaaaaagactggtattttatgcgatccaggggaagcgggatctggaaagcggcgtcatggggattatggagcctaaattaaactgcctgcgcatccgtgacgaattcgcgccggttattgtgccgggaatcgcatttgacagggaaggacaccgggtcggctacggcggcggatattacgaccgtttcttcgaggaagaaccggatcatcccagatttggtatcgcctatccgttccagcttttcgattctctgccggcagaatctcacgataaggggatggatctggtaatcactccatacgatcccggctgaaaccattcattttgataacagggaggaacgcgatatgacacttattgagacaggaaaaagagcgaaggagacggcgggggttcttggaattctcgattccgataagaaaaacgaggggctgagggctgctgccgctgctttgctggaaggcgaggaagatattctgaccgccaatcaggacgatgtgattaaggcgacgataaacggcatgagcgccggtatgatcgaccgcctggaactgacgccctccaggatcgaggccatggccgacggactcatcagtgtggccggtttggatgatccggtaggcgaggtgatctccatgaaggtccggccaaacggtcttaccattggacagaaacgcgttcccatgggagtggtcggcatcatctatgaagccaggcccaatgtgactgcggatgccttcggactctgctttaaatccggcaacagcgtgatcttaaagggcggaagcgatgcgctggagtccaataaggccattgtcagatgcctccgcgccggccttaaaaacgccggccttccggaagactgtgttcagctgatcacagacaccgaccgggaggtgacgaaggaattcatgcgtctgcacgactacgtggatgtgctgattccgcgaggcggagccggactgattcgttcggtggtggagaacagtacagtgcccgtcatcgagacggggaccggcaactgccatatcttcgtggatgagactgcggatttcaagatggctctcgatatcatattcaacgccaagactcagaggatcggcgtctgcaacgcctgcgaatcactggtgatacacaaaaagatcgcagaagaatttctgccgcttttaaaagccaggctcgataaaaaacaggtcgaggtgcgggcggatgaagaggcctgccggatcgtgccccagtttgttccggcgtcggaagaggattgggggacggagtatttagactatattctgtctttgaaggtggtagattccatagacgaggccatcgcccatatcaaccgttataatacgaagcattccgaggccatcatcacatcggattacgggaattcccagaggttcttaaatgagatcgatgcggccgctgtctatgtcaacgcttccaccagatttaccgacgggttcgaattcgggtttggcgcggagatcggcatcagcactcagaagcttcatgcgagaggccctatggggcttaaggagcttaccacgacgaagtacattatctatggaaacggacaatgcaggccgccggctctgtaactaaggacggcagcggtgcattacggccttcggccccgtttcgctgcacaggaagctgtttgcgtatctgagtccgccttgtttacagggcggacttgattctttttttcagatggacagccgcggcattttttgtgtttgcaatagaattgatttatgctataatattcaaagtcattccgggctttttgaggaacggaatgtggagtgagataaatggaggaaatcattgaatggatcatttacatatgacgcatgaagaagctttaaaagcggcaccggcagaggaaccgggcagacagcagttttttatggagcgctgccggcagatgatcggtgagaggaagaaaaacgggacgtatcgcggaacctttcacatcgagaccttcggctgccagatgaacgccagggattcggaaaaactgaccggaattttagaggcctccggctttacggagacggatacggaggaggcggatttcgtcctctataatacgtgtacggtcagagacaacgccaaccagcgtgtgtacggcagactcggatacttaaaccgtataaaacagaaaaatccggctatgatgatcgctctctgcggctgtatgatgcaggaggaaaccgtggtggaaaagataaagaagagctatcgctttgtcgacatcatattcgggactcataatatttttaaactggcagaactgatttctgaacgcatggatgagaagaagatggtagttgacatctggaaagaaaccgaccggattgtggaagaacttcccacggaccggaagtatccgttcaagtccggcgttaatattatgtttggctgcaataatttctgcagctactgtatcgttccttacgtgcgcggccgtgagagaagcaggaatccccaggatatcgtgggagagatcaggcgtctcgtcgcagacggcgtggtggaggtgatgcttctgggccagaatgtgaattcctacggaaagaatctggaagagccaatgacatttgcaaagctgcttcaggaggtggaggcgatcgacggccttcggcgcatccgttttatgacctcccatccgaaggacttatcggatgaactgattgaagtgatgaagaattctgataagatctgccaccatctccatctgccgctccagtccggaagcagcaggatcttaaaggccatgaaccggagatacacgaaggaacagtatctggaactggtggagaagatcagagccgcggttcctgatatctctttaaccacggacattattgtcggattcccgggagagacggaagaggacttctcagagaccatggacgtggtgagaagagttcgttttgacagtgcatttacgtttatttattccaggcgtacgggtacgccagcggccgctatggaagatcagataccggaggatgtggtgaagaaccggtttgaccgtctcctttcagaggtacaggcagtctcggccgaggtatgcggacgcgacgtgcacaccgttaagagtgtactggtggaggaactggatgatcatgtggaaggcttcgtaacgggccggcttgacaacaataccatcgtccattttaagggggaccgttcgctgatcggcaagatcgtggatgtgtacctcgatgagtcgaagggcttttattatatgggaaccatgaaatagcaacagaacagtacgacagaagaaaagaggaaaaaacgtggccggaatgtcaccaatgatggtccattatttggaaaccaagaagcagtacccggactgtatcctgttttacaggctgggggatttttatgagatgttttttgaagatgcgctcaccgtctctaaggaactggagattactctgacaggaaaagaatgcggcctggaggaacgggcgcccatgtgcggcgttccctaccatgcgcttgataactatttgtacaggctggtccagaagggctacaaggtagctattgcggagcagatggaagaccccaaacaggccaagggactggtaaaaagagaggttatccgtgtcgtcacccccggaaccatcaccagcgcccaggcactggatgagacgaagaacaactatttgatgggaatcgtttatatcgacgagcggttcggcattgccgtttccgacatcagtacaggcgacttcctggtgactgaagtggcgtcggaacgggaactggcggatgagatcaacaaattctgcccgtctgaaattatctgcaacgatgcatttttcgtatccggtgtggacaccgaggaggtcaagaaccggtatcagacagtcatctctgcccttgacagccatttcttctcggatgaaggctgcaggaagatcttaaaggaacactttaaggtcggctcactcgatggactgggactgcaggattacgatacgggagtgattgcggcgggggccgtcatggagtacatgtacgagacccagaagagcacgctgtcccatattacgaccatcacgccctattctaccggggagtttatgattatcgatacttctaccagaaggaatctggagcttttggagaccatgcgggagaagcagaagagaggaacccttctgtgggttctggataagacgaagacggccatgggagccagacttttaaggacttacatcgaacagccgctgatccataaggacgatatcatcgcccgccagaatgccatcgaagagctgaatatgaactacatatccagggaggaaatatgtgaatacttaaatcccatctacgacctggaacgtctgattggccgcatcagctataagacagccaatcccagggatttaatctcctttaagaattccctggagatgcttccgtatatcaaagatcttatgggagagttcacgactcctctgttaaaagagctctgggaagagctggatccgctggaagatgttcatgatctggtttcccgcgccatcgtggatgatccgcctgtttccttaagagacgggggaatcataaaagaaggctaccacgaggagacggacaagctgcgccatgcgaagacggaaggaaagacgtggcttgcacagctggagtccagagagcgtgataaaacaggaatcaagaatctgaaggtcaaatacaacaaggtgtttggatattacttcgaagtgacgaattcctttaaagggatggttccggactactttgtccgcaagcagacgctggctaatgccgagcggtatacaacggatgaactgaaggaactggaggatatgatcctgggggcggaggacaagctctatacgctggaatacggcctcttctgtgaggtgagagacaccattgccgccgaggttctgcgaattcagcagacggcccgggcgatcgcaggcatcgacgtgatgacctccctttccgcagtggccacaaaaaataactacgtaaagccgcgcatcaacgaaaagggcgtgattgacatcaagaacggccgccatccggtggtggagaaaatgatgcgggatgatctgtttgttgccaacgatacgtatctggataatacgaaaaacaggctttccatcatcaccggccccaacatggcaggaaaatcaacatacatgcgccagacggccttaatcgttctgatggcgcagctgggcagcttcgtacctgcagatgaagccaatatcggtatctgtgacagaatctttacccgggtgggcgcctccgatgatctggcatccggccagagcaccttcatggtggagatgaccgaggttgccaatattttgagaaatgcgacgaagaacagcctgatcgttctcgatgagatcggcagaggaaccagtaccttcgacggcctgtccatcgcctgggcggtggtggagcacatcagcaatccgaagcttcttggagccaagacgctgtttgccacccattaccatgagctgacggagctcgagggaaccataaacggtgtcaataattactgcatcgccgtaaaggagcagggagatgatatcgtatttttaagaaaaatcgtgaagggcggagcggacaagagctacggcgttcaggtggcaaagcttgcaggcgttcccgattccgtaattgtacgggcgaaggagcttctggtggagttaagcgatgcggatatcacggcgagggcgaaggagattgcggaagcaggagcgggtacaccgaagcatgccgccgttcccaggccggatgaggtggatttacagcagatgtccctgtttgacacggttaaggatgatgatatcgtccgggaactgggggaactggagctgggaaacatgacgcccattgacgccctaaacacattgtaccgtttacagacgaaacttaagaaccgctggcagtaagacacagttacaattcagccgtacgtctgaattgccgcaagagataaaggagcgataagccatatgccaaacattacgctactggatcaaaatacgattaataagatcgctgcgggcgaggtgatcgagaggccggcttctgttgtaaaggagctgctggagaacgccatcgatgccagagccacggcggtgacggttgaaataaaagaagggggcaccacctttatccgtgtgaccgacaacggctgcgggattccgagagaagaggttcccctggcttttctgcgccattctaccagcaagatcaagtctgtggaagacttatttacgatttcgtccctgggcttccgcggcgaagcgcttgccagtattgccgctgtctgccaggtggaactgattacaaagaccagcgaagccctgacgggaagccgttaccagattgagggcggcatggaacggccgctggaggagatcggagcgccggaagggactacatttattgcaagaaatctgttttataacactccggccagaaggaaattcttaaaaacacccatgacggaagggtcccatgtagccgaactggtggaaaagatcgcactttcccatccggagatttcaattcgttttatccagaataaccagaataagctgcatacctccggcaaccacaatttaaaggacatcatctatacggttttcggcagggagatcgcggcgaatttactggcggtggaggcgaagaagcaggatatctccatcagcggctttatcgggaagcccgtgattgcaaggggaaacaggaattacgaaaattattttattaatgggcggtatatcagaagcagcatcatatcgaaagccatagaagaggcctacaagccttttatgatgcagcacaagtatccgtttaccatgcttcatttcaccattgagcctgagcttttggatgtcaatgtccatccgaccaagatggaactgcgcttccgcgacggagagatggtgtaccgcatggtctatgacgccgtttccggggcgctggcgcacaaggagctgattccggaagtggaactgaataaggacaggacggatcaggaggcgaaggaggcgaggaaacgcgagccgtcgccggaaccctttgagcttcgcaggctggaggccatgagcaggcagcaggcggcgtgtgcaccgggatcgaaacggctgaaaccggcagagccttcactcatgaaagatcctgattttctggctgaaaactggctgaagaagccggctgcgccgccagaaaccaaccctctgcgcggcccgtctcaggaacctgtcccgagcagccgggaagaagcggcggccgttacaaaacccgctgcaccggaaggtgaaactattacaccggaacatgataatacagccggagcaggaaagccggaacagctggatctctttgacggaaagcttctggagccgaaatcaaggcagatgcacaagctgatcggccaggtgttcgacacctactggctggtggaatttaacgaacagctttacattattgatcagcatgcggctcatgaaaaggttttatatgagaaaaccatggcaacacttaaaaacagggaatactcatcccagatgctggatcctccgatcattctgactttgaatatgaatgaggaggtgctgttaaaagagcatatgaagtatttttcggacatgggattcgagattgaaccgtttggcggcagagaatacgcggtgagaggcgttccggccaacttactgtccattgccaaaaaggatttgctgattgagatgattgacgggctctctgacgacgtttcgacccataacccggacatcatttatgaccgggtagcgacgatgtcctgcaaagccgcagtcaaaggcggaaaccggctgtcggcggcggaggccaatgagctgattgaccagctcttgaatctggagaatccgtatgcgtgtcctcacggacggccgacgattatctccatgagcaagtacgagctggagaaaaaatttaagaggattgtatcatgaaaccactgattatcttgacgggccccacggctgtgggaaagacagctctgtctgtccggctggcgaaagccgttggcggggagatcataagtgctgattccatgcaggtgtaccgccatatggacatcggctctgccaaggtgacacgggatgagatggaggggatcccccactatctcatcgatatcctggaacccacaggagagtttaatgtcgccgtatttaaaaaaatggcggcggaggcggtccaggagatctattctcacggcagtataccgattgttgtaggaggaaccggtttttacattcaggcccttctgtacgatatcgattttacggagcagggagaggaacgggaaatccgggaggaactggaacgtctgggagaggaacggggatccgtttttctgcacgatatgctggcggagattgatccggaggctgccatggagattcatgccaacaaccggaaacgcgtgatccgcgccattgagttttacaggcagacgggggagagaatctccgaacacaacaggcgggaacgtcagaagcagtccccttatgactttttgtattacgtcctcacagatgacaggaagacactctatgagcggattgacagacgggttgacggtatgatggaggccggactggttcatgaagtggaacaattaagagatatgggctgcacgaagaacatggtctccatgcagggactgggatacaaggaaattctggattacctgatggggaatacgaccctcgacgaggcagctgctattttaaagcgggatacgaggcattttgcgaagcgccagattacctggtttaagagggagcgggatgtgcggtggctgaatctggaagactttggccgcgacagagaaaaagtcctggagaaaatacttcaggatatcagagaaacgtatggattggagacagaaaatcatggaaatggatgcgatgtatgagcagcttggaatcgaaaaaagggttctggagttcggaaaggagatcgaagaacatctttctgaacgctttgccgcaattgatgagacggcggagtataatcagctgaaggtgataaaagccatgcaggacaaccgcgtcagcgacatacattttgccgcaaccaccggatacggctataatgatcttggccgggatacactggaagacgtttatgccagcgtgttccacacggagagtgccctggtgaggccgggcttaatcagcggaacccacgcgcttcacgtggcgctgtccggcaatttacggccgggtgatgagctcctctcgccggtgggaaagccgtatgacacgctggaggaggtcattggaatccgggagagcaccggctctttaaaagaatacggagtcgtctaccgtcaggtggatttacttccggatggcagctttgattttgatggaattgcaaaggcaatcaacgaaaaaacgaagctggtgacaatccagcgttcaaaagggtatgcgacccggccgaccttatcggtggagcggattggtcagctgatcgccttcatcaggacggtaaagccggatgtcgtctgtatggtagacaactgttacggcgagttcgtggaacggatagaaccggccgatgtgggcgcggatatgatggtggggtctctcatcaagaatcccggcggcggactggcgccgatcggcggctacatcgcgggaaggaaggactgcattgaccgcgcctcctaccgtctgactgcccccggccttgggcgcgaggtgggagccagtctgggactgaatcagtctttctatcagggactgttccttgcgccaaccgtggtggcgggagccttaaagggggcagtttttgctgccaacgtctatgaaaaactgggattcgccgtggttcccaacagcaccgagtcacgccatgacatcattcaggctgtgacctttggaaaaccggagggggttatcgcattctgccagggaattcaggcggccgctccggtggacagtttcgtcactccggagccgtgggcgatgccgggctacgacgcgccggttatcatggctgcgggcgcctttgtgcagggagcctccatcgaactttcggccgacggaccgataaaaccgccgtacgccgtatatttccagggcgggcttacctggtaccatgcgaagcttggaattctcatgtccatgcagaaattaaaggatgcgggactgattacgttataggcagccattcggtttccgtttccagctatggcgtgaaacggtaaaaaagtgtatacacgacaacgtttctatgatagaataacaagacaggcatggattttcctgccaaaaacgaatgaggggtagtaacagatgaaacgaaaaaactgctgggtactgcttcttctggtgctgacggggattgtgctgggcggatttatcgggacgatggcgcaggatgtatcctggctgtcctggctgaattttggacagtccttcggtttcgattctccgttaattattaacttcggtattctggtcatcacctttggcctgagtatcaggatcaccatggcaagcatcattggagtggtattggctctcattacttatcggttcatttaacatacatatgtctttgacacgtacctggagagtagcggacaggagacatatgagcagaattacgatgaaagacataccggcggatgaccggccttatgagaagtgtctgcagacaggccctgagaggctgagcgatgcggaacttctctccatcatcatccggacgggatccagggaagacagttccctggcccttgcacaaaagatactggccttaaactaccccagcgagggtattttagggcttttgcatctttcactccccgaactgactcagatcaagggaatcggaagagtgaagggagctcagcttctctgtatcggagaactgtcaaagagaatctggaagaaggcagttctggaagatgtggcctcctttaccaatccggaagacattgtcaactactacgtggaagacatgcggcacatggagcaggaacagatccgcatcatgctgctgaacaccaagggcgtgctcttaaaagatgtgctggtttcccaggggacggtgaacgcttccgtcgtttcacccagggagatttttattgaggcgctgaagtaccatgccgtgaatttgattgtggttcataatcatcccagcggcgatccggctcccagcagggaagacatcactctgaccaggagaattatggaagccggagatttaattggaatccgtatgttggatcatattattataggagataattcctataccagttttaaggaacggggaatcatttagatggaatcgaaacgcagtaaatacgtcctgattgccttaacggtgatctgtgtgcttttaatcggccttacatcaatccatgacgagtggctgacgcctttgagaaccggagtcggttattttctgatcccggtacagtccggagtgaaccgggtgggctccgctatttacgatgagatcatggattatacaaaactgaaagatgctctggaagacaacaaggagatgaaggacatcatcacccagcttacggaggagaatacaaggcttcaggcggaggaatttgaactgaagcggctgagacagctgtatgagctggatcaggagtacggccagtaccataaggtcggggccagagtcattgccaacgactccagcaactggttccaggtgttccgtatcgacaagggatcgaaggacggaatcgccgtggacatgaacgtggttgcaggcggcggcctagtgggaatcgtcacggatgtgggcgccaattacgccacagtccgttccattatcgatgattccagccgtgtcagcgccatggcgatccagtccggcgacggctgtatcgtggcgggcgacttgacattgtttaaagaagggcgtctccgcattaccaatgtgctgaaggacagtgatttaaaggatggcgataagattgtcacgtccaataccagctctgtctttgtgccgggcgttctggtaggctatgcagcggaaattaccaatgacacaaataatgtgacaaaatcaggttatttaattccggcggcggaatttgacagtctgcaggaggttctggtcattacggacctcaaagcgaagatgatggaggaggcaggcccggaagacggttccaccgaagagacacaggccggcgggagtgaagcggatgaggcttcttcggaagaagaaaccaccgcggcacagtagcagctatgatgacggagcgaagtaacgatattgaaaggagcagaggcgatgaaacgaatcatttttaatatacttatgattattttggcctttacggttcagaactgcatctttccgctgcttccttttctgtccgcatctccgaatctgctgctgattctgaccttttcctttggatttatccatggaaaggaggccggtatgtactacggccttctttccggtcttctgatggacttattttacagcggccccttcggattctatacgcttattttcgtttatgtgggatatgtaaacggaatctgtaccagatactactatgaggattacattacgctgcctcttattctcagcgtggtcaatgacctggcgtataatctttatatttatgtgttccggttcctgatccggaaacgtctcggaatcggatattactttatgaacttaatgctgccggagattatctttacggtggttacaacactgcttatttaccgtattttcctgatgtttaaccgtcatctggaagagatagaaaaaagaggagattcatcgattgtttagagatttattagacatcttaaaagactttttgaagaaaatcatatcgtcaagactcctggttctgggagttatctgtatcgccatgtatgcagggctcatccataaactgttcaatctgcagattgtaaacggagaacaggcgctgaatgattatatgcagctgacggaacagacgcttaccacagcggggacacgcggtaatatctacgacaggaacggaaaggtgctggcttataataagctggcttattccgtgactgttcaggatacaggtgcatataaaacaacggcggatcagaacgccatgtatttaaggctggtccgtattttggagaagcatggggaaacggtacagggaaagtttgaggttgccctcgacagcaacggggatatgatctatacctcctcctcggaggctgccaggaagcgtttcctgagggattactacggattaaagagtgtggaagagctggatgacgaggacaataagtatccatccgcaatttcagccagagagctgtttgagaaggcgttcaccacagcaaaattaaatgagatgaaggatgccgacggaaatccggtcaccatgacggaccaggaggcgctggacatcatcaacatcaagtatgcgctgcgtctgatgtcttaccgcaaatacgaggcgacaacggtggcgacacaggtttctgacgagacggttgcggatgtcttagagcacaccgccgatctggcgggagtcaacgtggaggaaaccacgatccgggcctataatgacagtatcgcattcgcccccattatcggctataccggcaaggtacaggaggaccagctggaagaactgaaaaagagccgtccggactatgacgtcaacgatattgtgggaacgacggggattgaagccgcgatggagcaggaacttcagggaacaaagggaagtaagacgatctacaaggacagccgcgggcgggtcagggagactctcaacgagacggaatccaaggcaggcaatgatatttatcttacacagatcgcagggctgcagaccggtatttaccatctggtggaacagtctctggccggagttctgttaaagaccatactgcccggcgatgtggagattacgagtaccacggacggatccaacatgaagataccggtcaaggacgcgtatttccagctgattaataataatattctgtctctgaagcattttgaatcggaagatgcctcagatgtggaaaagaatatcaacagtaaattcttatcctccagggatcagattttttctgaacttcaaaatgagcttatgagcagtcatccggctacgttaaaggacttagaccaggatctggccgcctatatgtattatatctacacgtatctggcaagcccgaccgtgggcattattaaggaggacctgattgatcagacgagtcaggagtatctggcatggaaagccgatgagatcagtctgcgcgactacctgtattacggaattgcaaacggctgggtggatacgacgaagctggagaccggttccaaatattccaacgctgacgataccttccggaccctggtggattatgttctcgcggaactgaaggaagaccggaattttacaaagagaatttaccgttatctgatcaacgacgacgttatcacgggacaggaactgtgcctggcgctgtttgaccagggaattctggaatacaacgaggaagacatcaaccagttaaaggcaaccggagatgcctatgcgtttctgatgaagaagatatccaccctggagatcacgccggcacagctggcgctggctccgtgcaatgcgggcgtggtggtaacggatatcaggacgggagaggtgctggccctcgtatcctatccgggatatgataataaccggatcggtgacagcgcctatttcagccagcttcagaatgatttgtcactgccgctgtacaacaatgcgacccaggcaaagaaggcgccgggttctacctttaagccacttacggctgttgccgcactggaggaacacgtcatcggcatcgatgatacgatcgagtgtaccggacggtatgaagagattgatacaccgattaagtgctggatctatccggggcgccacggcccgttaaatatggttggcggcctgctgaattcctgcaactttttctttgcggatctggggcacaggctgtccatggatgccgaaggaaactacgttccatctctcggactggataagctgcacaagtatgcggccatgttcggtctggatcataaatccggcgtggaaatcgacgagctggagcctcagatttcggacatcgatccggagcgttccgccatggggcagggaaaccacgcttataccaacgtacagttatcgagatatgtggcggccatcgccagcaggggaaatgtcttcgaactcagtttactggataagatcacggattctgaaggtaatctgattaaagattatacccctgagatttcttctcatattgacgcggcggattcaacgtgggatactgtacagcagggaatgagggaggttatcgccagtggtacggcgaagaagctgtttgctgatctggaggttccgattgcaggcaagaccggtacggctcaggaggcaaagaacaaaccgaaccacgccttctttatttcctatgcgccatataacaatccggagatctgtgtgaccgtgaacattccgtacggatattcggcttcgaatgccgctaatattgcaaaaagcgtgtatcagtattattatggtgaaattgatctggaatcaattctgaatgccggtgcgcgtgacgcggcgaatgtcacgattcgcgattaagaaggggaagagaaaaggtcaggtggatatgatgcataataccgtagtgattaaaagcaacaaggcgggcatgaccgtttatctggagccggaggtcccgtttcagacgcttcttgccgatattggcaggaagtttggagacaacacaaaattctggggttcggctcagatgacgctgacgctggagggaagaaaactgacggcggaagaggaatttgcggttgttaatcagattatggagaattccaatttagagatcgtctgcctcgttgatacggacgcaaaccgcatcgaacgctgcgaaaaagcactgaatgagaaactgatggagctgtcctgccagacgggacagttctttaaaggcaatttacaggacggagagacgctggaatcggaagccagcatcattatcatcggagatgtggagcgaggctccagggtcatagcgaaagggaacgtgatcgtactcggtgcgcttaagggcaccgtatgcgccggagttgcgggcaatgaggccgcagtgattgtggcattaaccatggcgccgacgcagcttcgcattgcggattgtacctccaggctggacggccgggggaagaagctgggccgcggaccgatgactgcttcactggatgaaaataaagtctctatcaaaccaatgaaaaaaagtgtggaaatattccgaaaattaatgtagaatagaatatggattgaatcaggaggatatgagatgagtgaaatcattgtcattacttccggaaaaggcggggtaggcaagacaacaacctctgccaatgttggtaccggcctggccattctggggaaaaaggtagttcttatcgatacggatataggactgcggaacttggatgtggtcatgggactggaaaaccgcattgtctacaatcttgtagatgtggtagaaggcaactgccgtatgaagcaggccctgataaaagacaaaagatatccaaatctgtttttacttccatcggctcagaccagggacaagacctctgtgaatccgggccagatggtgaagcttgttgatgatctgcgggaggagttcgactacgttcttttagactgcccggcaggcatcgagcagggctttcagaatgccatcgcaggcgcagacagagcgcttgtggtaacgacacccgaggtttcggcgatccgtgacgcggaccgtattatcgggctgttggaggcttccggcatgaagaccatcgatctggtggtgaaccggatccgtatggatatggtgagacgcggggatatgatgtccctcgacgatgtgatggacattctggccatcgacatcatcggtgccgtcccggatgacgaggacattgtcatatccaccaatcagggcgagcctctggttggcataggaacaccggccggacaggcttatatggacatatgcaaacgcataaccggcgaaacggtgccgcttcagaacgtggcggcgcgcggagggtttttctttaagctttccagcctcttaaagagagcgtaggagggatgagatgagcctgtttcctgtattccgtaagaagaattcaggagagattgcaagaaatcgtctgaaacttttgctggttgcggacaaggcggactgttctcctgaagtgatgcagatgataaaagacgacatgatccatgtgatatcgagatacatggatgttgattccgacagaatagagatacagatgacgaagatgaagcagccggactgcgacagctacatgccggtgctttacgcgaacatccctattcgtgatatacctgacaaggggatatactgactatgctttttgactacaattttaaatactataattaccgtttagtactttacatggtggcgttatccgttattggaatcctcgtggttgcaagtgcatccggacaggactcctcaacggttacaaaacagataatcggtattatggtgggctttaccctggccatagggctttccatcatcgattatcatagaattattaatttatatgcgctggattacgcagtatgcatccttcttttgggtgcggtgctggtgatggggcacacggcgggaggagctacaaggtggatcgacgttccgggtatcgggcggatacagccttccgagttcgtgaagatcgggcttatcgtattcttttcctggtattggaataaatatcaggaaaagatgaatatgcctgttatggtggggattgcggccatactggccgtgatacccatcgctcttatctttgcggagccgaacctgtcgaccagtcttgtggtcattgtcatcatactctgtatggtgtatacagctggaatcagctaccgctggattggcggcgtgcttgcggttgccatacctgcaggcgcattgtttatctatctgctgacgcaggggttaatcccctttatccacgattaccaggcgagacgtattctggcgtggatctatccgcatgcggaacagtatgcggaaaatatgtatcagcagaagaattctatcatggcaatcagttccggacagcttcagggaaagggactttttaatacgacgattgcatccgtaaaggatggaaactggctgggaaccaccggcgaaacggatttcatctttgctatcatcggagaggagctgggttttatcggcggggtgaccgtcattgtgctcttcggtctcatcgtatttgagtgtcttcgcatggcatataaatccagagacatggcggggcggctgatctgcaccggcatggcggcgcttatcggatttcaggcttttgccaatatcgccgtagcgacacagattttcccaaatacaggccttccgcttccctttatcagctcgggagtcagctccctgatcagtatttttatcgggatgggccttgttctgaatgttggattgcaacgcaaaattggtaattattaaggaggtatatcgttatgaatataggattagttgcacatgattcaaagaaaaaactgatgcagaacttctgcatcgcctaccgggggattttaagcaaacacaccctgtatgcgacagggaccactggacgtctgattgaagaggtcacgaatctaaatatccacaagtatctggctggtcatttaggcggtgagcagcagctgggagcacagattgagcacaacgagatcgatctggtaatctttttaagagacccgctctcaacaaaggcccatgaaccggatcttgttaatatcatgaaaacctgcgacatgcacaacataccgctggcaaccaatttagcaactgcagagctcttaatcaagtctctggaccgcggcgatttagagtggcgtgagatgtataagtaggagtctgtaagtgaagaagaaaattacgatgaaagccggctgcgcatttttatgcgtgacgatgctgtcagggtgttccagcttcaaaaaactggaggatccctatgattttgtgcagaggacggcactatatgaaggtcatacgctttcggaccgggcagagagttttgcacatgatctctgtgtcgtcacggcggatactccatcctcagatcaggcggttaccgcggaagcggcggcggtctttgacctgtcggataaaacggtgattttcggaaaaaatcctttcgaaaagctgtatcccgccagtatcacgaaaaccatgacggctctgctggcgatcaaatacgggaatctgtccgatgaggttacggtaccggaggaagctgtgatcacggagagcggcgccaccttatgcgggattaaaccgggcgataaactgaccatggagcagctgctctacggtcttatgctgccttccggaaacgatgccggtgctgcaatcgcagttcacatggatggcagcattgaaaaatttgctgaccggatgaatgaagaggccagaaagcttggagcgacagggactcattttgtcaatccccacggcttaaacgatgaaaaccactatacgaccgcgtacgatctgtatctgattttcaatgaggctatgaaatatcctgatttcaggaaggtgatcggcacatcatcctatgatgctgtctacgctctggcttcgggagagacgacgacaaagacctggaagcagagcaactggtatatgaccggtgaacggaatatgccggaaggactgactgcgctgggaggcaaaacaggcacgacaagggctgccggaagctgtctgatcatggccagcagcggctcttcgggtatggaatatatttccgtagtcttaaaagcccctgatagaacgggcctttacgataatatgtcaaatatattgaataaaattgtagattagtcgttgcgttttatggggatttgtactataattactttaatattaatagactttttatacaaatcatataactcaaggaggagatcgctatggtgcagataatagcaggaaaaaagggtaaggggaagacaaaacatctgttggacagggccaattccgccatcagggattccaagggatccatcgtctatttagacaagagttccaagcacatgtatgagttaagcaacaagatccgtctcatcaatgtcaatgagtacccgattaaatcgagtgaagggtttattggatttatctgtggaatcatttcacaggatcacgatttggaaatgatgtttttagacagctttttaaaactgtcgtgtttagagggtgaagatattacagacaccattacgactttggaaagaattggtgaaaagtatcacgtgacctttgttctcagcgtatccatggacgcggagaatctgcctgagaatgcacaggccgatgtggttgtttcattataatcatacatagacaaaagaggaacgtatctgactaacgttgagggtattggcgggagtcagatgcgttttttgtttttttggcgggagggacgcggacgtgccgaagtcttgccggaaaagcggcgggggacgggcggagtcctggctcatgttccctcgggggcagactccaggcccggataggacgctgcgcagggggatcgggcaaattccgccgaactcctgatgagttcgcctccatgtcccctttcgtccgggcgttgatcgccctccctcaccccctgctccgcgccctctccggaccaggagtctgcgaccctcggtaaaattcgccaggactccgcccgtcccccaccgcttttccggcaagactctggcacgtccgctgactttctcccgctaaaagtttttttgataatagacagatatggctagtaatttctttcttttaaattttgccgcttggtcatttaaaaaataaagctggaaaaaaccagcggacgtgacatagacttggcggaaaggagccatggagcgggcggggaggtttggcgatttttaccgagggtcgatgtgccttagccgggagagggcatggagcaggaggtgaaggagggtgatcaacacccgagtgaaaggggacatggaggcgaactcatcaggagttcggcggaatttgcccgatcctcctgcggaatgtcctctcccggcttaggcacaccccccgagggaacatgagccaaacctccccgcccgctccatgactcctttcctcacaatccaaaccgcgtccgcgtatcttccgcatatctttcgcttgaactttttgcatttacctcttataataactagaagggaaaggaggcgctctcttggcacaacaaaaggtaaggccccgaaagaaggaggcggccccgaaaaaaaagaataaaaagatcattaaatacaggaagccgcttcatatcaatgtcggaatgatcatctttgcattgatttttgtttatatggtgttcagcgtctatacctacatacggagggacaagatccagttctatgaagtacaggaaggaagcatcgtgaataataccgattataccggtattattttgagagaagaagaggtgaagactgccgacaggtccggatacattaactattatgtccgggaaggaaaaagggcgtcggtgggaactcggatctattccattgatgaaacgggaaatatcgcgtcattcctggaagaaaatatggaggaaggcgttacgctgacggcggagaatctggctgatttaaaaaaacagctgacggtattcagtcttacgtatgatgataaccggtttaattcggtatatgatacgaagtattcgctggaagctgacgtgatggaatacatgaattttaatgcgcttgatcatgcgggcaacctcctggatgaggcgggaattaatttccagcaggtgcgggctgatgaggcgggcgttgtctcctacggcgtggattcttatgagagtcttaatatctctggtatttcggaggcggtatttgaccgcagtaaatatacgaagacgattacaaaggcggggaatctgattgaaaaagggattcctgtctataagatgattacgtcggatttgtggtcggtggtatttccgatgagtgatgacgatgtgaaggcgtatggcgataagacgagcctgacagttaccttttccggtcatgacttaaaagccgcaggtaatttttcgatgattaccggaacggacgggaaaccgtacggcagacttgattttgacaaatatatggtgcagtttgcttcggaccgctatgtggattttgagattatctctgataaggtggacgggctgaagattccggccagcgctgtgacgacgaaggatttctatctcgttcccatggagtatttgacccagggcggagacagctccgaaagcggatttaacaaggaggtctattcggagtccggaagctctgtggtatttgttccggcgacgatctattattccgaagaggacaactactatatcgagatgggcggagagaatggctttaatgccggcgattatattgtgaagccggattctacggaccgctatcagattggggcgagcgcgtccttacagggtgtatacaatatcaataagggatatgccgtgttcaagcagatcgatgtgctggcgtccaatgatgaatactatacgataaagaagaatatgacgtacggtctggctgtatacgatcacattgttctggatgcgtcgacagtcagtgaaggggaattaatctatcagtaaagaggtgctgcaatatggtaaaagaaaatctggaagaggtaaacagacggatttcggaggcctgcagacgggcaggaagaagccgtgaggatgtgacgctaatcgctgtcagcaagacgaaaccggtctccatgctggaagaggcgtatgagacgggcatccgggattttggtgaaaataaggttcaggagctgtgtgagaagcatgaggtgcttcaatcggatatccgctggcacatgattggccatttacagcgaaataaggtgcgccaggtgattgataagaccgtcctgatccacagcgtggattctgtcagactcgcagcccagatcgaagaggaggctgcaagaaaggggatttccacagacattctgctggaggtaaacgtggcggaggaggagagcaaatacggcttccgcctggcagaaacggagcaggcgatgagggaaattgcagcatttccccatgtgcatatccggggattgatgacaattgcgccttttgtagacaattccgaagaaaatcggccaatttttaaaaaattatatcaattttatgttgacatgcgtggaaaaaacattgataatgttactatgagtatgctctcaatgggtatgaccggagactatgaagtagcgatagaggaaggagcaactctggtaagagtcggtaccggcatttttggtacaagatataagattggagagaatgaaggatgagcataattagcaaattgctggagagtgtgcatttaaacggtgacgatgaagaggatgactactacttagatgacgattacgaagatgaagacgacagacctgccagaaaaggactctttgccaaaaaagatgacgatgactattacgatgatgaggaagagtacgatcagaaaccgcgctttctgtcacgttctcccaaggtagtaccgatgaaacagcgctccatgatggaagtatccatggtgaagccgacgtccatcgaggatgccaaagagatttgtgactatatgctggccgggaaagcagtagtgctgaacatggaaggaatccatacggaagtggcacagagaattattgattttacatcgggtgcgacatactctatgaacggcaatctgcagaagatctcgaattacatatttatagcaactccggaatccgtagagctttccggtgattttcaggacttgctgaataatggtacgctggatatgggcggaatgaatcttcgtctgtagccatggcgataaaagacaatcagaatttatgtatagtacaagcagacaatcttccaatcaccggcctgccggcgccgcggtatttttcgtgacggggaccgccaggaaggaagattgtttgctttctattttactttggaggagccgcatgatggagaaaagaattccggtacacatggatggaaaaaaagtttacgatattgtaatggaacaatccttcggacagctggaggaagaactgcgcgggatgaatctgggggaccggaagatctgtgtcgtcacggattccaacgtggccccgctctatttggaggaagtggagcgaatcgtgtcagcctgctgcaggaagacggaacacttcattttcccggcaggggaggagaataagaatttaaatacggtgaaggatctctatgagaccctgattttaaagaagtttgaccgccatgattatctgctggccttaggcggcggtgtagtgggagatttgtgcggctttgcggctgccacgtatttgagggggatttcatttattcaggttcccaccacccttctttcccaggtggattccagcattggagggaagaccggggttgattttgatgcctataagaatatggtgggcgccttccatatgccgaagctggtctatacgaatatttctacactgaaaacccttaccgacgttcagttctcttccggaatgggggagattatcaagcatggcctgattaaagatgcggcatactatgattggctgggagaacactggcaggagatcaatgagagggatttgtctgtctgtgaggagatggtgctgatcagcaaccggattaagcgcgatgtcgtggagacggatccgacggaacagggagaacgtgcactgttaaattacggtcatacgctgggccatgcgattgaaaagctggctgattttaaactgatgcacggccactgtgtagggctgggctgtatcgcggcgatgggcatctctgcagccaggggcgcattgccggaagaggcgcttacgaatttgaaggagagaatggagcgttttcacatgcctcttacagtcagcggactttcagctgaggatattattgaaacgacgaagagcgataaaaaaatggattccggaacgatccgttttgttctgctggaagaggtggggaaggcttatctcgacaggaccgttacggatgaggaaatgaatgcgggactctcacgcattttggcataaggagacttacatgaaacagaaagcaaaacttgttacaggacttatcataggatttctggcggcgatcggactggatcagtggacgaagctgctggcggtgaatcatttaaggaaccagccgccttacgtgatctgggatggggtatttgaatttttgtattcggagaaccgcggcgcggcctttggaatgctccagggaaaacagtggtttttcctgattatcgcggtgattgtggtggctgcggctgtgtacgcggttttccgcatgccggcttcgaaaaagtatctgccgctgcatttgatcgccatgtttctctctgccggcgcgataggaaatatgatcgaccggtttacgagggggtatgtggtggactttttgtatttcaaactgattgattttcccatcttcaatgtggcggactgctatgtgacggtgtccatgtttttctttatcctgctgttcctgtttctgtataaagaagaggatttgaattgcctgtcaggccggaaggaaagggaagcggattgaaacagcagtttgtggtagaagaggaagataaagccatccgtatcgataaatacttgtcagaacggtgtcctgagctctccaggtcttatcttcagaagcttctgaaggcagaggctgtatttgtaggcggaaagccggttaagagcaattataagacggcggccggagacttgatcgaattggaggttccggaggctgtagagcccgaaatcgttccggaggagatggatctggatatcctgtatgaagactccgatattattctgattaataaaccgaaagggatggtggtgcatcctgcggcgggacattacagcggaactctggtaaacggcctgatggcccactgccgggctgatttatccggcatcaacggcgtgatgagaccgggaatcgtccaccgcatcgatatggatacgacaggcgttctcatcgtctgcaaaaacgatatggcgcataactccattgctgagcagttgaaagtgcactccataacgagaaagtattatgccgtggttcacggtgtgatgaaggaggatgaggggactgtaagcgggcccatcggccgccacccggtagacagaaagaagatgtgcattaatgaaaaaaacggccgggatgccgtgacccattaccgtgtgctcgagcgcttccgccagtttacgtatgtggaatgccggctggagacggggcgtacccatcagatccgcgttcatatggcaagcatcgggcatccgcttctgggagacgcggtatacggtccggcgaagtgtccttataagcttaccgggcagacactgcatgcgggagtgctggggatcgtacatccgagaaccggagaatatatggagtttacggctccgctgccggagtattttgaagaattattaaggaaattacgtaccacctagaagagtttctgggtggtatttttaaagaaactgttaaaaatatataaatatatagatttttctgaaactttgatgtataataagcatataagataactggaaggagcggtctatatgagcggaaatttagtaattacaataggaagacaatgcggtagttccggtaagatcatcggacagaagttagccgaggagatgggtgttaagtgctatgataaggaattacttgcgctggcagccaagaacagcggtttatgcgaggaattatttgagactcatgacgagaagccgactaacagctttctgtattccctggttatggatacatattccatgggatatacgacgtccggctatatggatatgccgattaatcataagatatttcttgcacagtttgataccatcaaacagctggcagatcaggaatcctgtgtaatcgtcggacgatgcgccgattatgcactggcagactatccgaaggtcgtgtctgtgtttatcacggccagcgacgaggaccgcatcgcttccctgaagaagctttataatgtggaagaagcaaaagcaaaagatattatggtaaagacggataaaaaacgtgcgagctactataattactattccagcaagaagtggggcgatacgagaagttacgacctctgtattaaccggagtgcggtgggtgttgacggcgcggtgaagatgattcgtgcgtttgcggaaaccaagctggaatggctgaaagagaattcataaagacaaacaaatgtgggacccggcaacgggtgcatcagggatacagagaacggccgcaggaggaattgacgatcctgcggccgttctctgtttttattccacggtgacggatttggccagatttcttggctgatccacatcgaggttcttgccggtggaggcgtagtaggcgatcagctgaaggacaaccgcgatggggaagacggtaaaacgatcgccgatcttcggaatgcggatatgaatatcggcgatccctccgtctaagacggcatcctccctggtgatgagaatcacgaaggcgccgcgtgccttcacctcacggatgttggagatggtcttcgcaaagactttttcctgtgtggcaatggcgataacgggcacctcctccgtgatcagggcgatggtgccatgcttcagttctccggctgcataggcttccgcgtgaatataggagatttccttcagcttcagagcaccctccagggagaaggcgtaatccagcccccggccgataaaaaatgcatcggatttgttgatcagatgtgtgaccagggctttgatggagtctttctgagcaatcatggcttccatggccggaatggcatctaacagctttttcatgaaatcggcggcctgggagacgctgtatttgccgcgtacgagggccatacggcagccgatcatataaagggcggccagctgcacggaataggcttttgtgctggctacagcgatttcagggccggcatgggtatagagggtgtaatcgctctcacgggcgatcgtggacccttttacattgacgatggataatgcggcagcgccgtaatttttcgccagccgcatggcggccagcgtatcgatggtctctccggactgggagatgatgatgaccagcgtatcttcgccgatcagcggctcctcataacggaattccgatgccaccgatacggtaacggggattctcagaagcggttccatcatgcttctggccaccatcccggcatgcatggcggtaccgcaggcgacgatgtgaatctgggaacaggatgtaaagacatcgtcggggatctgatcatcggtaaaatcgggcagtcccttgttcaggcgggggagtatggtgttcctcagcgcctccggctgttcgtggatctccttcagcatgaaatgtggaaatccgtttttcatggcggcatccatgttccagttgacttccatcaattcgggcatctcttcgtggcggtggagattgtagagatggactttataggaggtcagacgcacgatgtgatcttccgggacgacaaagtactgccgcgtatagggaatgagcgccgttaagtcggaggctacgaaggagcctgaacgcgtgtaagctgctacgagaggacttacgttccggatggcataaatctctccaggatagtcttcgaacatgatacagaagctgtaagagcctttaattaaggcggcaagacgggtgatggcctccagcgggtctccctggtagagactgtcgagcacccaggcagccacttcgctgtccgtctcggagtgaagcctgccctgtaagtgaaactgttcggtcagctgatggtagttttcgatgattccgttgtgtaccagagttacctttcctgcctgatggggatgggtgttctgagtcgtcactcctccgtgggtcgcccacctcgtatggcccaggccgcagtgggagacatctgtaatccgttccattgtctcccttaagtttgccaccttgccggtccggcgaaccaggcagatgtgggagttctccatgcagagtgcgactccggcactgtcgtacccgcggtattccagctgggaaagtccgtttaaaagtattttcttagagtcaaggggtcctgtataaccaataattccacacataattgttaatctcctctcatttttcctgaaaaaggccgcacaaaaaagagactgtctgtttctcgtctttgagaacggcagctttttcagctttggtttttcattttgtcggttagtctgtaatttttatctgttatgctgttctgtcgtatcagtccggttcctgcccgtttgttttgcggttacccgcatatttcgttcaggatacacgcccggatggcatggaagagcatccgccgaattcttcgataaactcttctcctcgttaaccttcagtaccggttttcaccgttcacgctcgtacttacaggtgcatggcgcttagctttgctattgaaatttatgcctcctcataaatttagtctattatatcccgaactgtatggtgcgtcaatagacggtttacaacgtttttacttaaactttctttttcattttacattactcttataaaattagagcataccggaaagaaaaggaagggaatgtgatggcgagtttatcgttggtaaatgtgtgcaaaacctataagaatggttttgaggcggtgaagaatgtgagcctggatatcagggatcgggaatttctgatactggtgggaccgtcggggtgcgggaagtcgaccacactccggatgatcgccgggctggaggacatttcctccggccagctctggattgacggtcagctggtcaacatgctggaaccaaaaaacagagatttgtccatggtgtttcagaactacgcgctgtaccctcatatgacggtgtatcagaatatggcgtttgggctgaaagtgcggaagactcctaaggaggagattgacagacgggtgaggcaggcggcgaagatcctggacatcgcccaccttctggaccgaaagccccacgcgctgtctggtggccagaaacagagagtggcgatcggcagtgtgattgtaagacagcccaaagcgtatctgatggatgaacccctgtccaacttagatgcaaagctgcggtcgcagatgagagtggagctctccaaactgcaccgggaactgggggctaccgtgatctatgtgacccacgatcaggtggaggccatgacgctggggacgaggattgtcgttatgaagagtgggaaaattcagcaggccgccacccctggggatttatatcaaaatcccgtgaataaattcgtggctggttttatcggttcgccggcaatgaattttctgccggtatgggtggaacggcgtgacgagagagtctgcctggaatttggcagcagcaggctgtacgtcaaccgtatgtgcgcctcccggctgatcgaaggcggatacatgggaagaagggtgtatctggggatcagaccggaagactttcatgagacgggccctggagaaaatgcgcttttatttgaagtggaaatcagggaaatgctgggggccgaacagcttctctatggaaacagcgggcgaaatgagctctgcgtccgtatgaaaccggaattcaaagcggaaccgggaagtacggtgacggtctttgtcgatatggaccgcatcaagctgtttgacatggagacagaagacaatattttatatctgtaaggagtgaatgttcaaatgaaagtgaatgcaatggtaaagaaggccggcccatacgcctatctcgtcccggccctggcggttttcgcggttttcctgttctatcccttttttaagaccatctatttaagcctctataaaacgaacaaaatggggcaggccaggctctttgtgggagccggaaactataaggacttattaacgtcctcctcatttttaaacagcctcgtcgtgacgggcgtgttcgtggcgattgtggtctctgtaagcatgctgctgggacttttaacggctctgctgtgcaataagacgtttccgggaatccggatcttcagcacagcctatgcgcttccaatggcgattgcctccagctcggcagccatgatcttcaaaattatgcttcacccgtcgattggcattgtaaacaagctgacgggacttaatatcaactggatcagtgatccgaattatgcgcttctctgtgtggctctcgtgactgcatggctgaacagcgggatcaatttcctgtatttcagcgcgggactcagcaatatcgatgaatcaatctatgaaagggcgtccgtggacggcgccggggcgtgggccaaattctttcacctgacactgccgggactcagccccattctgttttatacgctggtggtcaatatcattcaggcatttcagtcctttggccaggttaaggtgctgacacagggaggaccgggagagtccaccaacttaatcgtatattcgatctaccgggatgcgttctttaactaccggttcggaggcgcggcagcgcagtcggttcttttgttcggcatcatcatgattctcacactgtgcatgttccggctggagaagaagggagtaaactactgatggattctatcataactgcagagagaaacaaaatgagcgaggcagagatcgccagactctaccaggaggccaatcggaaggctctgatcaaaagaagagtggaacggaccgggcttgtaactgtaaacatcgcagcggcttttgtaatcctgctgccccttttctacgctgtgagcatcgcttttatgccctccagtgagctttttaccacggaactcaatctgtttccgtcaagtcctaccctggataattttaaagaggccatgagaaaaattccgctgggacggtttattctcaattcgtttattgtggcgggcgccatcacctttgggcagatcatatcctgctcactggcggcattttccttctcctttttagactttaaaggcaaaaatattctgttcatgatcgttatggcgacaatgatgataccgggcgaggccactatcatatccaattacttaaccgtcagccgccttaaatggctggacagctatcaggtgctgattatcccctacctgacatcggccatggggatcttcctgtttcggcagttttatatgacgtttcccatttcgctgtatgaatcggcgaagattgacggatgttcgaacctgaaattcatttttcggattctgattccgcttacgaaggcggcaatcggagctatggcagtctatacctttatcaatgcctggaacatgtatatgtggccgcttctcgttaccggctctgattccatgcggaccgtgcagatcggaatcggaatgctggacagcgtggattcccagtccatatccatgatgattgccggtgtggtgatgatcattataccgtccatctcggtgtttttgatcggacagaaacaattgatccatggaatgttttcgggagccgtcaaaggctagcgataaagaaatcccgatgcagataaataagaaaaaatttctggaggaataagcatgaaaagaactacaattgctgcctgcatggcccttatggtggcagcaggaagcgtgacgggctgcagcagccagactggaacaaacgagagcagtacgacggcgcaggattcagctgcgggaacagaggcgttacagagcgatgcggcaggaaataagacagacggtgtgaccatcaccttctggcattccatgggaggtgtgaacggcgaggcaatcaatacgctggtggagcagttcaataaagagaacacggatgggattaccgtggaagctcagtaccagggaagctacgacgatgcgatcaacaagttaaagagcgctcagatcggcaatatgggagccgaccttgtccagatctatgacattggcacccggtttatgatcgattccggctgggtggtgcccatgcaggatttaatcgacggggagggctgggacttaagccaggtggaaccgaatattgcggcttattacacggtggatgacattctctactccatgccgtttaactcctccacgccgattctgtattataacagggatatgtttgagaaggcaggaatcacagaggttccggacagcctgccgaagatcgcggcggcaggggacagcctgctcacaaagggaggcgccggagaagtgatttccctggggatttacggatggttttttgaacagtttacctccaaacagggagcagactatgcggataacggcaatggcagaagtgcggcagcgacagccgtggctttcgataaaaatggcgcaggggttaagacacttaccgcctggaaggctctggcagaccagggatacgctcccaacgtgggacgtggaggagatgccgggctggctgatttcagcgcaggaaaggctgccatgacgctggggtccacagcatccttaaaacagattttaaatgatgtaaacggtaaatttgaagttggaaccgcctattttcctaaggtaagcgatgaggaccaggacggtgtgtcgatcggaggcggttctctgtgggctttaaacaacgaagacccggcgagacagaacgctgtctggcagttcgtaaaattccttgtttctccggccagccaggcttactggaattcccagaccggttacttcccagtgacgttagccgcacacgaggagcctgtttttaaagaaaatatcgaaaaatatccccagttccagactgccatcgaccagcttcatgattccacgccccaatcagcaggagcgcttctcagtattttcccagaggcgagacagatcgtggaaacagaaatagaaaatatgatgaacaacggtacttcaccggaagatacggtgataaaaatggctgaaagcatcaataaatccatagaggattataatctcttgaacgagtaaagaaaaggagtacgggatgatgaaaacgaaggtttgggcacacagaggggcgtcggcctgcgcgccggaaaatacgctggaggcatttgaactggcggtcagtcagggtgcggatggcgtggaactggatattcagatgacaaaggacggctctctggccgtgatacatgacgagaccgtggaccgggtctgtgacggcagcggctgtgtggcggatttaacgatgaaggagttaaagaggtttcgctgcagcagactccacccggagttcggggaggcgaggataccggagctgggggaggtgctttctctgctcaaacctacgaaactgaccgttaatatcgaactgaagacaggcatcgtccgttacaagggaatcgaagaggccgccataaagctggtgaaggagatgggaatggaggaacgggtgatctattcgtccttctaccaccccagtctcctaaaggtgaaacggctggatccggattccaaaacgggacttttatattcagatggctggatccatgcagcttcctacgggaaaaagctggaggtggacgcgcttcatccggcactatatcatcttcgctccggaaaacttatcaaagaagcgaaagagaaaaagctgccgctccacgtatggacggtgaacgaggaggggaccatgaggatcctggcagaacagaagattgccgccctgatcaccaactatccggatgtggccaggagggtagtacgtgaaacgagcaaatcctgaatcttaataaacaattaaatctttttctctgttttttgacggaacaatatggtatattcttactttagaaatgattacaggaagatgaaaaccgatgaaacgaagcaaaaccgtcaaaaaccagacgatatccgccattttcatggctcttttgggaaccgtggtccacgtggggtcccagtcttatctttcattctacgatgtaccagaacataaaccggcgcggcctgtggtctccataccacttgccgtgccggagaagataatgccggaagaaacggtaccggcgacagaggcggaagaagtattttcgccttctcttgctgtgctgaacctggcttacctctatccggagggggaggaagacacggatgcacagaacagcgtggcagggcagattctccgggtattatccgtaaaggattcggaatggctggcctctgtctatgatttatccaatcgaaagcctgtggaagccgctgcaaagctgggacttcctgcggagagcgtaaggggacgctataatccgctggatgaaatgcagaaagtggatgatcccgacagctgggaactttctgagtggtcgcatatcgacatggtctttactgatgaaaacggaaacagaatcatggccgattccaatattaaggaaattatggctatggcaaacacctattattattacacggatcctgaggactcggaggcatttctggattatgtgaccagtctctgggacagatcacactccatccattattccatcggagaggtctactactgtgacggctgtctggaggaaacgcccggtgaatcagagtctgttggtgaatcaggggctgccggtgaatccgaatctttccgtgatctaaagtctgccgttttggaggaaacacaggaggaagctgctgaaagcagttttgcgggatcaccggaggggacacagaatgaaacagatacggagctgagtgccgctgctgctgcaaacggacaggaatccgcggagacggcggaaatcggtcccgggatagggacttctgcggctgaaacggctgcggaacaggagacaaccgctgagattggtccgggaatcgcactgatggaatcttccagggcctccgaggcggaagcggaagtggaaatcctggcggaagaggcggttcctgaggtgaagtgcccggggcatgtggaccttcatattacagccgccgttgctggcgtctcatcatcggggaattccctgttctccattgcagagcagctgataaccggaaagcgggaatccgtttttcccggctggacggatgagaacaaaaatgctgttctggaactggctgctcaggactggaaggaggtctatggactgacggtttcgtctgcttatatcacgaatcccctttcccagtccgagatggagtattacgtaagccttcttcccgccgatatctcaccggaacgaaggcgcctgatccgctatgccctgtcctctgtgggaaccgttccgtactactggggcggaaagccgtcggcaccggattacgacggaaatcacttcggttcgctggtaaatgcggatgaaaagggccgtacgatgaagggattggactgctccggctggatcagctggatctactggtcggcgctgggaaagcggctgccggcagagagcaccgacggactcgccggatgcggcgctgcagtggcgagagaagagttgaagccgggagatataattgtcagattgggcgaggaagggcatgttgtcatgttcctggcctgggaatcggatcataaaatgaaggtggtacacgagtccagcggcagtgtaaataatgtgacaatcagtaccatgcaggccgactggccttattatagaaagctgattgactgagaaatgtaagagaaaagcaagaaacaggcaggctgtttctggtagaataagtaaggtttgccaaagtaaaacacaggaaaggactgaataacctgttatggattatgaggatgaattagaccgcatgcgcgcacagaagagacgcggcagcggggcaaagagaaaggtggataaccgcggcgggcgggcgtattacgagaccggggctggaagaaacccgagggtggaatatacgggacggccggatgtacaccagaagcttcggcaggaacggatgcgtaaaaagaaaaagaagaaacggctgctgatgatggaactggccgttctggcgatactggcagtaagtgcatttttcatttttggcaagggaacgaatcaaaagggatactggacgattgcagtgttcggtgtggattcccgtgacggcaatctggaaaagggcgcgctgtccgatgtagagatgatctgtaatattgacaaggccacaggggagatcaagctggtatccgtataccgtgatacatatttaaagatcaacagcgagggaacgtatcataagatcaatgaggcttattttaagggcggccataagcaggcggtagaggctctgaacgaaaacctggatttaaagattgacgattacgctacctttaactggaaggctgtagcggaggctatcaatattctgggcggtgtggacatcgagattactgatgcggaattttcttacataaacggttttatcactgagacggttaattccaccgggatcggttcctatcagctgaagagcgcgggtatgaatcatctggatggagtgcaggcggtcgcatatgccagacttcgactgatggataccgattttaacaggacggagcgccagcgaaaggtagtaacgctcgcgttggaaaaggcaaaacaggccgatttcggtacattgaagacgctggtatctgcggtattccctcagatttcaacgagtattggcatcgatgatttgtttacgattgctaagggaatcacaaagtatcatatcggcgagactgccggtttcccattttccaggacaaccatgagaatcgggaagatggactgtgttattgctacgacactggagagcaatgtcattcagcttcatcagttcctgtatcaggatgaaaattatactccgtcgtctgcggtaaagtccatcagcgcgagaatctcggaggagagcgggatcagcgaaccggggaagaatgctcccacaggcggcagctctacgaaaaagaatccgggggcagcttccacgcccaaagagacggctccgcctgagacggaaagcatagcagaggagagcgtggaagaaaccatggaaaccacggaggagaccgaagcagagacgacggaagaggagactgccgcgtctgagacctatgaggacggaagcctcataggcccgggcgccggccttgatggtgcggcgaaagaaccggaggagacaaagggaacgaaagcgccggaggaagaaactaaggcggagacaaaggcctctgagccggctgcgcctgaaccgacgaaggctccggagactcaaactcccccggcgcctggtgataaaggtccggccggaggttcttccggaggtccgggagaagtgggacctggtgtttaaccggtcagtaaaatgagattatggcttcgagtttacataaatatattatgtaaactcgaagccgtttttctatgcggtacattagaattcgaaatgaaaactttaagaaaactttagtctttctcttcccttatctttagaatccgggtgtacgattaagaaaaagaagagagtgaaaatggattggagggtatcatgaagaaaatcatctgtattctggggacaatgctcgcggcattgctgctgatggcctgcaatggaatgtcgttcagcggcagcaggctggggaatggcagccagcttattatgaagtacagcatatttaataccacggattcccagtactttgagatggatcagggggacgtgatcgatgccgatattgtgagtgattccggaaagctgtcggtaaccattcagagtgaagatggggaaacggtatatgaaaacgaggacgtaccgacaggtacattccagatcgagatcaggaagaaggggatttataagattaaagtaacgggaaggaaggcgaaaggcagtttaagctttataaagagtacggagcaggattccctggaagcgaatctggcagcgctgagcaattcttattatgatgggcagtcttcacgggcttttcagatgctgcaaaaatccattttcaaaaaaatgctggcaaacggctggctggatgagatgagcggcttggataacgccagatggaattacgatacctttacgaattacacggttttggaccgtgaccctgctcttcatgaggcgcagggggagttgtactgctgcacattttccgccgatcacgacagatatggttacatcgtaatgtcgtataacggcgacggcctgtcaaaaatccgcgcagttgaaactccatatctctatgatttcctgcttgaatgggatcagattgagaaggaactggaaacctccggagtggatttatcaacggcctctgcacggagagcagaagtattgggagaggacggcagcgatccggcagaaggaatttcttttaccgacagcaaaggaaaccaatatttctaccgctttttaaaggacgggtcagcgggaaataaaaaatgaaagccgtgcagcaggctgtgcttagacaaaactatatgccattccggaatttggggattgtccatgaatagcatgtaaaagaagagctggatgtagtataacggaaaagcagaactatggattgaaaaattaatggttctgctttttacaatgtacttgacaaatgaacggggctgcgttaagattagtgcaacagatgatagtaacaaaacgataataactaactgataataactaaaagaaaataagagaaacggtgaaaggggacgctatgagaaacgggatctacgatctggaaactttaagaaaggcctataacagaggcgatcatttaaaatatctgtttttctggggacatacgccgcctgcggacgggcatatcaacgagtcgtgcttcagtcagtggtggatggaccggtttacggttgatggtacggaatatacgtgtgcggaacagtttatgatggcggaaaaggcccgtatgtttggtgacggggagatgctctccatgattcttaaggccaggcatccgaaagagatgaaagcgtacgggcgtgctgtcaaaaatttcgatcaggataagtgggatggcgcatgctatgagattgttaagcgggggaatctggcgaagttttcccagaatccggagttgtgggattatttgaagtccacgaaaaggcgaatcctggtggaagcgagtccgagagaccggatctggggcatcggtatgggaaaaagtaatcctgatgcggaatgtcctgtgaagtggcggggaacgaatttcctgggcttttccctgacggaggtccgcgaccttctcctggaaaaggaagaggaggaaacggatgaagaagaatgaactgcgtgaccggaacgggctgacagaggctgagtttctgagccgttacgaaccgggtgattacgtgcggccgtctgttgcggctgacatggttatctttaccgttatggagacggaggaggagaattacaggaagcttccggaaaaagaactggaagtgctgctgattcagagaggcgtccacccctatctgggctgctgggcacttcccggcggctttgtacggcctgatgagacaacggaggcggcagccaaacgggaactgaaggaggagacaggagtggatcacgtctatctggagcagctctataccttcagcgagccggagagagacccgcgtacatgggttatgagttgttcctacatggcgctcatcgactcttccaaggtccgggtgaaggccggggacgatgcggatcaggcggtctggtttcgtacttccttccgcttaatggatgaacatatcgagtacagaaagaacatgacctatgacggtatgaagacgatacgcataaaacggtatgaactggaattaagccacgaggacgtggtgctgcgttccttaatagaaaaaaagattgtaaaaacagaacacgaaacagttacggaatacagaattttggaaaatgacgggctggccttcgaccatgcgaagatcattgcctacgcattggaacggctgaagggaaaggtggagtatacggatctcgccctccatatgatgccaaaggagtttacgctgacccagctgcagcaggtgtatgaggtcatcctggggaaaacgctgttaaaagcggcgttcaggcgtaagattgcccatctggtggagggaaccgattccttcacggagaatgagggccaccgtccctccaaactgttccgcagaaaattggaggaagaataatggacagaaaagcgacggcgcgggaaacgctccggattctggaacagggatattatctgtatggagaccagaggatttccatcgaagaagcacatagaaaatcagtaaagggaagcgtactgatcaccccggaggaggggacccggctgctgaaggcgtatgaagacggcaatcgcacaggagacgcgcagagctgttgcaccgtgggagatatctccaccgtggaggcagcctggaagttgttcctggagggaaagaaggacatcgccatcctgaattttgccagcgccaagaatcccggcggcggtttcctgaatggagccatggcccaggaggaaagcctggctgcctccagcgggctttacaagacgctgaccgttcacgaggagtattacagaaacaaccgggcatgcccctctatgatgtatacggaccacgccatctattctccggaggtagtgttcttccgggacggaggtttccggctcctggagaagccgtttccttcgtcggtcctgactctgccggccgtcaatatgggccaggtcctgttaaagggcgaagactgcggtacggcggaacatgtgatgcgacgccggatgcagctggcgctcgccatttttgcagagagaggagcgaagaatctggtcctgggagcgtacggatgcggagtattcagaaacgatccggtaaaaatcgccgcatggtgggaggaactgctgaacggagagttcagaggcattttcggacagatcgtatttgcagttttggacagaagtaaaaataaagcgtgcctcaacgcatttttggaaaaatggtaaaataaagggtggatatgggagaaatactggccgtcaggcgggattgctcccattttatatgaggtcaaatgaattgcatattatggggttctatgctaaaattggtacaaatggccaaaaggaaatgagcctttggcaggcaggaacgacacctgcaggaggagtaacggaagatgaacgagcagataacagccagggaatgtgtgaaagcgctttgctccgcctggtttgaacggcgcagtatggaggagaccattgttttttttgccgatgatgtcatgtttatcggcactggtgaaggtgaatccgcccacggaaagaatgagatggccaattatatcacccaggatattcaggagataccggagccgtttacagtgggagtcaccatcgttcatgagcagcagattggtgaaaatatctgcaatatctcgatcgggctgacgttaaaaaataccttgtattcctggctgctgcgcggcttcgctgtcctgatgagggagcatggcgcgtggctggttaaaagccttcatttcgcagagcccagcggcaagcagagggaggcggagcactatccgcagacgcttgtcatggagaatctggcaaaacagcgtcagaagcttctggacgattctctgccgggcggcatgatggggggatacatagaggaaggatttcctttttactttatcaaccggcggatgctggattatctgggctatgagaatgaagatgcctttcttcaggatattggcgggttgattaccaactgcatgcatccggcggaccgggagatggtagaccgccaggtggcccgtcagctggaagattcggatgagtatgtgatcgagtaccggatgaaaaagtgcgacggctcttatatctgggtccatgaccagggacgtgtggtgacggcggaagacggccggccggcgatcatgtcggtctgtgtcgatgttaccgcccagaagcaggcaagggaagaggtactgagcctttataataacattccaggcgccgtattccggtgccgttttgatgcggaattttctgtgattgatgccaatgacggtctgtttgagttccttggatataccagggaagagtttgcacagatgggcaatgccatggcttccgtgatttatcccgatgacctgcgggagatgacagaccgtctgaacagacagctgacacacagcaatacgattcacaatgagaaccgtctgatctgcagggacggaacggttaaatggatctccatcaaggcacagctgctgacggaatcgggcggtgaacagtatttctactgtgttttcgtggatattacggaggagaagcttctgcaggaccgcatgcgggaactgtatgaaaaggaactgacttatttcgcggagatgtcctcttctgacggcagtattcaggggcgtatgaatgtcacgcagaaccgggtggaaagctatctttccactttggatatcagccttaccagtacggatcatacctatgatgagtcgattgagagcctggcagcctgtgttgtggatgccgcgtatggagaagaaatccgatggtctctgcggcgtgagaagctgctggaagactatgctgcagggaagacggattatcattatgagtttctgtgcagatataacggaaacgccttctggggcagcatgaattttaaatcctgtttaaacccggagaccggtgatattatcgtgtttttctatgtcatggatattacggagcagaaactgacggaacgtctgctaaagagtatcgcggagctggattacgacagcattaccgatgtcgatatccggcgggatacgtaccagcaggtctccttcaacagctcggagaagaacctgattccgtggcagggagaatttcagaaagagatcaccaagattgcggagcagtacatggacagcgcggcagggaacgagtatctgagacagctggacagcggctatatgaaggcgatgctaaaggatcagaatacctattcctttgtgacggagatgcgggatgaatacggaaacgtaagggttaagcgttttaaagtgttttatatcagcagagagctggggcggatctgcattgtgcgcactgatgtgaccgatattgtgcggggagaacagcgccagaaggaagaactggcggcggcgctggccgcggcggagcaggccaatgcggcgaaaagtgattttctgtccagaatgagccatgaaatccggactcccatgaatgccatcatcggtatgagcaccattgcggccaaatccatcggggacgatgaacaggtggctgactgtatctccaaaatcggcatctcttcccgcttcctgctgtccctgatcaatgatattctggatatgagccggattgaaagcggaaagatgctgttgaagaatgagaagatccccatggaggatttcctctgcggaatcaattccatctgttatccgcaggcggcctcaaaggcggtggaatacgagtgtattgtggacccggttctggatgattactatatcggcgacgccatgaagcttcagcaggttctgatcaatattttaaataatgcaatcaaatttaccggagagagcgggaaagtcactctttcggcctctcagcggagcaggatgaaaaacgatgccgtcctgcgtttcatcattaatgacaccggtatcggcatgagtgaggagttcctgcctcatatctttgagccgtttacccaggagtccatcggcactaccgccttatacggcggaacgggtctggggatggcgatctccaagagcattgtggatatgatggatggcaaaatcacggtgcgttccatcaagggaatcgggacggagtttaccgtggatgtgaagctggggattacggaagaggagaagctgcgccacaatcagaaaaaacagaattttaatttctcccatttgaagacgctggtcgtggatgacgacgtggccgtctgcgagagcgccgttgtgacgcttcatgagatgggaatcaaggcggaatgggtggacagcggacgcaaggccgtcgacagaatcagggagtgctgggcccgtggggcctattatgatatggtcctcattgactggaagatgccggagatggacgggatcgagacggcgagacagattcgccggattgtggggccggatgtcacgatcattattatgacggcctatgactggagttccattgaacacgaggcgaagctgaccggagttaatctgctgatgagtaagcccatgttcaagtcttccctggtgtctgcattttcaagggcgctgggagagaaggaagagcaggaacaggaggccgccggctttgactttgatttctccggaaaacgtgtgcttctggtggaagataatgcgatcaataccgaggtggcggcgctgctgctcactgaccagggcttcgcagtggatacggcggaaaacggactgcgcgcgctggagatattcagcaaatcggagccgggatactacgatgccatcttaatggatatccggatgccgattatggacggtttgtctgctaccgtcaatatccgccatctaagcaatccggacgccagggatattccgattattgccatgacggccaatgcctttgacgacgatattgaaaagagcagggcggcggggatgaatgcgcacctggcaaaacccatagaaccggaacggctgtatcagactctgtatgattttatttttggaaaggaggagtgacactgatgtgtgaagacgctcatgacgatttaggaggcagaagagagtgatagacaatcaaaagaccgctttatttgagcagatgccggtgccgaaggcggttatgaagctggcagttccgactattttaagttccctggttatggtaatctataatctggcggatacttatttcgtcggaatgatgaacaatccggtgcagaatgcagcagttacgctggctgcgccggttctgcttgcgtttaacgcagtcaacaatctgtttggcgtgggcagctccagcatgatgagccgggcgctgggacggaaggactacgatacggtccgccagagctctgcctttggattctactgtgcgctgatctgcggtttcctgctttcttttgcctgtaccatctttcagcagcctctgctgacgttgttaggcgccgacgtgaatacggctcaggctacggaggagtatttaaaatggactgtgtccttcggcgcggcgcccgctatactgaacgtggttatggcatacctggtgagatcagagggggcagcgctccatgccagcatcggaaccatgagcggctgtctgttaaatataatcctcgatccgatttttattctcccgtgggggtttaacatgggagccgccggagcgggactcgccacatttttatccaactgtgtggcctgtatctacttttttatcctgctttatgtgcgcagatcgaatacttttatctgtattcttccgaagaatttccgcatgaagaaggctattattctcggcgtgtgcggcgtgggaatcccggcagccatccagaacctgtttaacgtgaccggaatgacgattctgaataatttcacctcttcctacggcgccgacgcggtggcggccatggggatcacacagaagatcaacatggtgccgatgcagatagcacttgggttttcccagggaattatgccgctggtcagctactgttatgccagcgggaatcgaaaacgaatgaaggaggcagttctatttaccgtgaaaacactgcttccgtttctgttcgtagtgtctctgtgctattatatcggagcgggaagtctgaccagagccttcatgaacaatgaggccattattgcctatggaacgagattcctgcggggcttctgccttgcgcttccgtttctctgtatggatttccttgccgtcggtgtatttcaggcggtcggtatgggcaaagcggctcttacctttgcggtgctccgtaagattatcctggagattccggcgctctatgcactcaattacttatttccgctttacggtctggcatacgcccagtttacggcggagtttgtcctgggaatcacggcagtatggatgctggcccggattttcagaaaaatgcgggaaggcgaggctgctgcgggttaaagtgcagcggagtattccgcaacgcggccgtttcagcgcttgggccggtagatgatctcgttgacggtataaactgtgacaaatgcatttttgtccgttttcatgatataggacatcagcagggcatactcatttttgtcaacgatggtgatgatctcttttttcggctggtgatcgtaggcgccgatggcttcatagatggtggctccgctgtggagctggtttaagatgaagtcccggatttcttcctcgtgtttcgagatgatacatactcgtttctttaagttgaagccgaagatgaagtgatccagtacaatgccgtttaaatacgttcccagtacgctcagcaccacgattttcttatcgtaaaccagggcggaggacagcgctacgcacatgccggccagggacatggctttgcctaaatccatgtgaaaatatttattcagaaattttgcagcaatgtccaggccgccggacgatgcgttccggttaaacagcatggcaagtccgatgcttaccacaaaaatgtagcagagcatgtccagaaatgcatcatttgtgatcgactgattattggggaaaatcaactcaaacacacccaggattacaggaagcagaagtgaggtatatacggtctttgcaccgaactccctgccgatgaacagaaaccccaggatcagaagaaggatgtttaatacaagggtgatggccgaaatgttcagcgggataaaattgcccagtacgatagccagaccggagatgcttcccactgacacatggctggggatcagaaaaaagaatacggcggcagccacgatgatggtggctgcggttatcattgtaaattcgcggattacttcccattttttcatatggaacctccaaataaagatagtaatgttcttcccggcacataaccgccggggagtcgttctgtctggtattgtaacataacagaagcattcttgcgagaggtaagaggaaaatacatgaaaagcagaaatgacagatggatagcagcagcggcctgtattgctctttgcggagtactgactgcatgcggacagaaggaaaagatacaggatattgaaactacagtcacatcacaggcggaagaggagcaatccgcgggggatcatgaccgcaggccagagagtgagactctttcttcagacggtgcggagaacgggtaccggatcatagaggaccagacatttgaagcgaacttaaatcctttgggagaggtaaccttcgtctcctttgaaccggaggacagggcaaattcctttgcagacgccatctttgagctgaaggacggagacaggaccattgcggttttagaaggtatcagcagagacaatatacgggaaggggaacggctgcaaaaggtaaaggcggtgtcatttccggactataacagcgacggatacagtgacattattattatctgcagctatctgtctgtgtcagagacggcagcaggcgctgtctattccgaggtgagaatctatcaggggagtgagagcggaacgttcactctggagaaggggctgtcaaaggatgcggatgccgcgcttgcggaaaagactgttcagtccgtcctgggatttctgggggcgggaaagaagagtgaagcaccctccggctggaaacaggcatacatcgattatattcaggcacaggacgaggaagagtgggacggctatcagctgatctatatcgatgatgacgacatcccggagctggtgaagattggaaacagtgaagcggttggctgcatgattgcggcctgggatggcggccaagtggttgaaaaccagctgaaccggctttatttcagttatattgaaaaagaaaatcttctctgtaactccgaggggagtatggactactattacgatctggtatacagcctgacagatggccggttatctctgatcgccagcggttactatggcgcaggggatcgttccaaccttgaattcgatgaagacgggaatgttatctatcagtatgaatggaatgggacgccgatgtcccgtgaggaatacagtcaggctttcaatgcggtctatgatacctcgaaggccagagacgggtatgagtgggggcagtggctgactcagtcacagacgattcagaaaatcagtgaaatgcagcagtgacattgcaaagaatcgataattatggtaagctatagataaattttgtgagaaagagaggcgtcagttatggataaaaacggattggattttgttgttgaaaagtcaaaggaattaatgagtgcgtcaacgtgcagcagtgaggcaaaggccgcagcccaggcctggcttgatgcggttggcactgaccgggaagcggaagagacaaagaagtatgtggaagaactggaagcagatatcatgccgattgacggtttgatcggtttcgcagaatccgaacatggcgcccaggtttttggtgcggataaggccctggaggttgcggctcatgcaagagagatcaaagccgccggagcaaaatactgtgactgcccggcctgcgctgcggtggaagcgattcttgataagaaggatattcttctgggtcagaagtaaggatgaaccggaatactttgcaagggcatcggtcagctatgaccggtgccttttaccacatgaaacaagagaaggcaagaaagcgaataacatggaattaaaattgaattttgaaaaccggtcctgcggcgtgtctgtttttcttccggaaggaacgaaaccggataaaaaagcgctggatgagctgaaccgtatgatggagctggagcataccgtggaatgcatgaagaaagcgggctctttttttaagaatccggacagcgccgtgagaaaggccgctgtgacaccggatttccacaagggagccggaattcccatcggtacggtactgatgacagagggctttgtgatcccccaggctatgggcaatgatattaactgtgggatgagactgtataccacagacctgaaggaagaggagctggaagggaagctgtctgttctgctgccagagatccggcgtattttctttgagggcggacgcgggattgccatgaatgggattcagagggaggccatgctgagagaggggctcaccggtcttctggaaacctccggagaggcagctggaacgggaatctggaggttctacgatcgagaggaacaggaagaggaactggagcgtactgcgttcaaaggaagcctgtgggccgaagagacggaaggactggaggattttatcggtgacgcccatacactgacctatgacgatcagatcggctccatagggggcggcaatcatttcgtggagatgcagcgcgtggctgagatctatgacgggcagactgccaatgcgtggggaataaagagaggtgccattctccttatgatccatacaggctcgctgatgattggccatcagagcggcagaatcagccagatgataacaagagggctgtatccgaagctcattccccatccggataatggaatttatcttttgcccgaaggagagggagagggcagggaatggcgtcgtttccgcagcactaccggcaacgccgctaattttggatttgccaaccggatgttcctgggactgatgcttcagaatgccgtcgaaaacagggtgcatccgtttgagatgaagcttctgtacgactcaccccataattttatctgggagaaggagtcggaggggagaaaatcctatattcacaggaaaggcgcatgctcggccagaggaatggctgagatggagggaactcctttcgcttattatggggaaccggtgatgattccgggttccatgggaagttccagctatctgttaagaggcatgggaaatccggacgctttatggagcgcaagtcatggcgccggacgaagactgtccaggggggaggcgatccatggcagtgaccgtgaattccaggaatttatgaagaagtttcacatcgtaactcccattgaccctaacagaagtgatttaaagggacggaacgatatcttaaagaaatgggaggagtccctccgttctgaggctccctatgcctataaggacatcgacaaagtggtgaaggttcatgcagatcatggtatggccggcctggtggcgagaatggaaccggtgtttaccataaaagcataggcggaaggaaacagaataagaataaaaaggcagaaaggcattggaaaggtaatagacagaacatgataaacagagacgatatgctggaactgacaaggcgtatgacccttgcgagaacctcctttacgaggattgcaggctgctatgtagacagagatggggattttgaggggagttttaatacgaatttcctgaaagtcccggctccggagaggacaaaaaagctgaaactggcaaaggagatcccgttctcagcgacaaatgttaatctgaaaaagtatgaatttacacaagacatgcggaaaccggggagtatgtggcagctgcttatggcgatgaatgagtgcggattaaagaatgatgccctgatggacactttttacgacctgatcatggaaaaataccataagaatgaaccgtatgcgatacttgtctttcatgaccgatacgacattccggcaaaggggtctgacggggaacggcagtgggagtcagaggaagtgtttgaatatatgatctgtgccatctgtccgatgactggggaatatgagccgggaaaaccggaatgtggatttttgttcccggcatttacggacagaagcggagaccagaaccatattaatatctttcaggcggacgccgggcggcctcacagggaactgctggagatattgggattgggatgagaaaagctgagggccgggctgcctgatcagcccggcctttgaacttgaatgaataattgctttatcgatgataattccggcatgcgctatgcatatacacagatgagattatttttcgagatgaggcctggttgtgtttaaccatgatcagcacgaggcgcaggtggcagtggaggaaaacgaaagatggatcagttattcggtagggaaaaatattttttacgaatagttgaaaaccaattgaaaccatggtacgataaagagagcgatttccaactatgcgcgaaacaacactttaacgaatagttgacgttcaaaagcaccgttttacaccaattacataaaggagccattttacatgaaacttcaacggctatacagtctcacccgccaggcgatcgactactaccatctgattgaggacggcgatcacattgctgtcggtatatccggcggtaaagacagccttactttgttatatgcgctgcaggggttaaaacaattttatccaaagcgttttgaattatcagccattacggtcgatttaggctttggagactttgacttatctcctgttaaagaactctgtgagcgattttccgttccctatacgatagtttctacggaaattggaaaaatattgtttgagacgcgcaaagaatctaatccatgcgcactctgtgcgaagctccgcaaaggtgctttaaatgatgctgccatcaagcttggctgcaacaaaattgcatatgcgcatcaccgtgaggatttgattgaaaccatgttgttgtcgttaatttatgaaggccggttttatgcattttcgcccagcacgtatttggaccgcacgggattgaccgtgatccgtccaatgatctacgtgaaggaggctgacgtgattggctttaagaataaatacgatttacccgtatgcaaaaatccgtgtccggtggatggtcatacaaagcgggaatatgttaaaaaattaacgaaaacattggaacaggaaaatcctggcgttaaggaccgtctcttccatgcaattgtcgatggaacgattgagggatggccggaaagggggcagctgtcatgaacacactctcctaccatcagcagagagatattgagaatgtcaagcatctaagggaactgatccgggaacttccgcccttctgcgccgatttctttcgcggaatcgagccacgcacctcttccaggaccagaattgcctatgcgtatgatttaaaggtattcttcgattttcttctgaaagagaatcctgtgattgcgaagatggatatgaaggatatcagtctggatcatctcgacaatctgaagcttgtagatatggaagaatatatggagtacctaaaataccgtttcaatgataagaatcaggagataaccaacaaggaacgcggaattatgcggaaaatttcttccttgaagagcttctacaactattattaccgaaatgaacggcttgtaaacaacccggccgctttagtgcagctcccgaaactccatgaaaaggagataatccgtctcgacgtggatgaggttgctcttctcctcgatgaagtggaaaaaggggaggcgcttacggagaaacagaaaagctatcatgagaagacgaagctgcgcgatttggcgttgcttacgctgatgctggggaccggaatccgtgtgtccgagtgtgttggcctggatattgacgacgtagactttaaaaatggcggaatccggattcacagaaagggcggaaaggaagtaaccgtgtatttcggttctgaggttgaagacgctctgaacgattatctggaagaacggaaaatgatcattgcggaggaaggccacgaatcggcactgtttttgtcccttcagagaaaaagactggctgtgcgcagcgtggaaaatctggttaaaaagtatgcgcggatcgtgacgcctttaaagaaaattacgcctcataaactgcgcagcacctatggaactaatttgtataaggagaccaatgacatttacctggtcgcggatgtgctggggcacgcggatgttaatacgacgaaaaaacattatgcggctcttgaagatgagcggcggcgcagtgcgcggaataaggtacggcttcgtgaggactgagaatcgtatcagtatctatggatctttggagtcagggtcaggaagagagaatttggtcggaatcgatccaattctctcttccgtttttaacagaggagaatatttatatgctgaagatttactgtaaagtccctactatagagatagttccactgtcgaaaaagcctgtgcagttgtaggaccatctgccttctgataaaggaatggttttggtttcgctgctgccgcccatggtaatgcgctgctcctggttggacggagaaaataaaaacaaatctacgctgccgtttatggaagatgtaatttccagggtcagaatctgtccgtcttttgcctcaaagccagaggaatgcacaatgcatttttgcccctcatcgcttaaatctattacaatcatatcatttggatcgggatcggttacagtaaggccggagggggcatctcccgccgctcctgccgccgcagactgtgcagaggataacgtacccactatggagatatttccgctgtcgaaaaaacctgtgcagttgtaagaccatctgccctccgataatgggattgtctttgtctcactgttgcctccgatcggaatgcgctgttcctgattggagggagagaataaaaataaatccgcagccccctttatggaagaggtgattttcagggtcagaatctgtccgtcctttgcctcaaagcttgaggaatgtatcacactgtgctgcccctcattgctcagatttattaccactgtattttctgcatcaggagaagccgcataagcaccggtcacagctgcagtaaaactcaatactaaaaccagggcagccgaaactgccgcagttaagcgagttgttcttttaaatctcataattgcatctaacctctctttcaataattccctgctttcgttgagcgtcacggaggcaagagaatccctgtaacgtcctccggcccccatagcatgcagtaaggtatctccataggctttccgcccgcccgggtcaagggtctttatgacagcttcgtcgcaggacagctcacaggcccggtcgatttcacgtctcatcaggtaaacaagcggattaaaccaatgcacgcacacaattaactgtatcagccacttataaaacatatcccgtcgtttatagtgcgtcaattcatgcagaatcgtatattcaaaatcggaggatgataagtcggctgtcggaagtacgatacagggatggaaaaatccgatgagtaacggtgatgaaatgaggctgttcgtgcaaaactccaccgtatttttcaccctgcttttttccacaagttttccaaaacgctccaacaggtcgatatctcctgcttcttcgctgccggcccgaatatattttacaaagtcctggtagatcgtgattttccgaattaacaggatgagagcaatggcgaaccagccggaccacagatgtttccacatggccgatgatacgattcgtgccagaatgctggcggatttcatgggttttctttgttcgtgatgcagctttttggatccgtcagttttgtattccgctgaagaaataccggccacggcggtctgctgtccggttggagccgccaactctgtctgcgtgacggccctgtcaattccttgaaaaaaagttcccatgaagttttcttccggtgcaaaaggcagcatcagacgggcggcaactaccagccaaatatagtattgccaccgcttgctcagccgctccttaatcaccggccggagcagaaacagaaggagtattaacagggatccggacagggaaagggacaacacggtttttaggatctcggtcatttaccgctctctcccccctcccaatatcttctcaaatcttccatatcttcagcagaaagcagatccttttcaattaatgtggatacaagcccttttgcattgccctcatagattttctccaggaaggtctccgcctgtgccgtctgatacgacgattcggaaacgatggcgatatattcatttcggcgcccgatcttggccgttttcaaaaaccctttggcgatcagtctggaagataatgtaataattgtatttttcgtccagggcgtccccctgtcctccagtgcttttgcaatatctgcatataaagctttattgccgtttgcccatatgattttcatcagttccaattcatattccgttatttgatgcaagattatcagcctcctcatataagattacaatttgtactctaaatgtatgataacattttgtactcaaactatcaagccttttccctgctttttgaaaaaatacttgacagaatgatgtgaaacgcttatgatcaagtcaggtaatttcaggaacaacagaaagaaaattatagaaatcagaggtctgagagattgtatattagattaagatagtaaactgttcgttataagacaccatgtacaacgccataaccgtgcagtaccgtaagcatttgccggtacgcctgatttgtgtggtttgtatgtgttgataaccggaacagttttttgtgtcttagtctgccgttttggcaaagatacaatctctttttttgtacctgaaattaccacaatgccgcagcaaggaggctgaatactatatgaaacaattaaatgagaccataagaccccgcgctcttctggcaggggtacgcttaaatgagaatcaagattttgaagtatccatgaaagaactgaacaatctggtaaaggcctgtgacatggaaccaatggccaggatcgaccagaatctggccagtataaatgccgcttactatattggttccggtaaggttggggagattcgggaagcggtggaaacacttcgcgctgactatgtggtatttaacgataccctgtccccttcccagcttaaaaacctgcagagagagatcgatgtgcccgtatgggaccgcacgtatctgatcctggagatattttcacggagagcccagaccaaagaggcacggatgcaggtggaatcggcccggctccagtacatgctgccccggcttatgggactcagagactctctgggccgccagggcggggccagcggttctctaagcaacaagggatccggtgaaaagcagattgagcttgaccggcgtaaaattgaggggcggatcagtgaattaagacgtgaactggaacggatggagcaggaacgaaatgttcagagaagaaagcgaagccgtggaacctgtccccaggccgccctggttggatatacgaatgcgggtaagtccactctcctgaacaaactggtggagctgtcaaacggaaaagaagaaaagatggtcatggcgaaggatatgctttttgccactctggataccacggttcgaaagatctcgccgaacggcagccaggattttctgctgtctgatacggttggatttatcagcaggcttccacacagcctggtaaaggcgttccgctccacgctggaggagattcgctatgcggatctgctgcttcacgtagtggatttttcagatgagcactacaaagaacagatggaagtaacagaggagacactgaaggaactgggagccggtgatattccccgaatctatattatgaacaaggccgattccgttatggagggggaaactctccctgaaatttccgggaaccggatctatatgtctgccaaatacggcatcggaattccggagctgctgcgtatgatggaacagattctcttttctgaatatcaggaggcccgttttttgattccttatgaaaacggaaacgtggtacactattttaacagccgcgccatggttcacagccaggagtatcaggaacagggagtctgtctgactgtcagctgccgggagggcgacagagagaaatataaacagtatttgacgtgataatatcatgaaacacttgatctgccgataaagaaaagtaccggatacagcaggccgtcacacggttttttgtatccctggtacttttcttttcggaatatatgttcttgatcaatggctgttctcctgaatcaccactgaattaatccatgatcacgagatctgcagaagccggattgacgaaaatacgtatgcggtctacggataccgtttcgtaagatccgatccgtctgtttttgatatcatcgagaagctgttccttgcccgccagaaagagttccatatcattctgaaggtaggcgaattcaattcccacaaacggatcctctgattcctgctccgaatctctttccgaatctcttaagtagggatagaccgcctgctcattataggtgatctgaaaacgaacggtattctccggaatcgtctcatccggtataatcttagtgggattacccgaatggctgtaaaaaaagtaattgccatatattctcagcttctgatcctcctgaagctgaaacgaatagtctagattctctgttaccatcttcacatcgccaatcgttgtctttccggaataggcaaatgacgaaaattcggaaagggcgattccggtgccgattcccgtaatgaatattccactgcagaaaactgcgatcagggccttatgtatgttacgcatcctgtacctcctctgtgagttcaatagcggtttcctccgcctcataacggtttgatttgctgtttatgcgcagcagactgatacagaagcaggtaaacgcaccgctgcagagcacggaaccgaacagaaccagggtggggcctgtcaggggatatcctttgaacagccatacgagaagaacaccgaagcagaacagggatcccagaacaaacaaaccgccaaacagggcaagaaacatcataaacagattaaagcaccaccgcaggcaccagaggaacaggcgaatgattccatgaaagccgctttggaacccatgggcgatggagcggcccactgtatgcaggacggtgatttctcctgcggagttcgctgaggcagttcttcttcgctctctctttcttacttccgtattcgcggtcacagtactctcctctctgcgcagcagactgcgaagctttcgtatgggacagagtaacagataaaccgcttttcttcccagggtttttcccgcctcaaaacaatggacggcaccattttgtaccgcggtgaacaacttcttacaaaaacggacgagcttatcacggagatccgttccctgtacagttccgggctttacaggcggcttgccgcttccttttgccgtgctaccggaaaattccgccttgacgtggtaggcttccaaaatctgggcagccagctccttaacgctgccaaaatcgcggatcgcttcctcttcgctcaacccgctctccaccttcatatcaatatgctgggagtactcttccagaatatcctgctgttcctcatcttcaaggacgaggagatgccggtttaattcttctaaaaattcgtttttattcatccttctgctcctttaaaaatgtacatacccgctgctgaaattcgttccactcctgctccagcttctcccggtagaggactccggcagcagttaaatggtaatatttccgcggcggcccttccgtggactcccgcagataggtctcaaaatagtgctcgttggtcagacgcttcaaaagcggataaatcgtcccctcattcacatcgatgaccttggatacctcttctaccagctcgtatccgtacatatcctttttcctaacggactccagcaccaccagttcaaggactccttttttaaactgtgcattcatgttaagtcctcctttaatactatattatacatactactatgtaatgtcaagtactaattaaaataaaatactgaatttctgacggaaccaggaaaggttcagacagatgatacaccaatggccctcaggatacatgaacaaacaccggcttcgcatgatctgattcgagtacagatcatacgaagccggtgcttgttgcagttatgaatcaggtgtgtagtgttcacctgtgtatatgaatgacaggctgcggctttccgctcctttcgttacaatcataagacatattcgcagcggatcttcttccactgccgttacctctcacctctcagccagaacttcagaaacaggcacacagtacatgatagtcagatgctgtccgctgtggattacatcctcctttaatccattcatattctttaattcagtgacgtagtcagcagtggacattctgcagctccctgcatactcatctgcgattccccagagcgtatcgcctttctgaatctcaatgctggtatagtatttttgagactccggaagttctgtttcatcggccagcgcattcatcagagaatgaccgcagacgttcgacagaatcaaaacaactagtgccattgtaatcattatttttttcatctgtaattaccccctgttactcttttgttgcgaacacagaacacatgttctgcatgaaaatatcataccactcgaacaaatgtttgtcaagaaagaaaatcatttttttcgaacaaaggtttgcatttttttcgaacatatgttactattaaagaaagaaaaaggattgaggaggctgtgttatatggctcaggagaagattacagcaaaacagcaggaaattttagaatatatcaaagaaaccattttaaaaaaggggtatccgccggctgtcagggagatctgtgaagcggtacatttgaagtcaacctcttccgtccattctcatttggagactctggaggaaaagggatacataagaagagaccccaccaagcccagaacgatcgagatcattgacgactgctttaacttaacaaggcgtgaggtggtgaacgtgccgcttctcggtaccgtggccgccggtgttcctcttctggctgaagagaatattgagaattattatcccatccctgtggagctgcttccgaatgcagatacctttatgctgaacgtaaagggaaacagtatgattaacgccggtattttcgacggggatcaattgatcgtggaacggtgctccactgcttacgacggagagattgtcgtcgctctggtcgatgattccgccacggtgaagcgattttacaaggaggacggctattaccgactccagcctgaaaacgatgagatggaacccatccttgtggatcacctggagatccttggaaaagtgatcggattgttccgcctggggatccattaaaatttgcgtgattcataaacgaataaaaatggcagaaaccggagaagaggttgacataattaatttatgtcaacctcttctccggttctgtctgttactgcatggtttgatctttgatcgttgttttattcgattattccagttcgctgacatccagtctctttccatcccgccagatacgctccagatcgtagaagagtctgttgtcccggtcgaagacgtgtacaatgatatcaccgtaatccataagaatccagttggcggactggtagccctccacctgtcggcaggtgcagcccatcttgccgagttcctcttccacgttgtctaccatggcctgaacctgattggaattggaaccgcttgctataataaagtaatccgccatgacggaaacgctgcggatatcgatgatactgatatcttcgccttttttgtcagataaagccgcgtaagctgctttgaccatctcgctagaatgattcataatttaatttcctttcttttcctcgtgaagctgtctgtaataatcatatgccagattcgtcatggaatctacataacagccttttccattcagataatccagggtgtcctttaaaatctgatagatgcattccttcagatccgtaaacgccagcgggcgcaccagcggtaaatcgggggcctcgtaccggcggggctcgatataatctgctgtaaagatgatctcctccagcagtgtcataccaggccttccggtggtgtgccaccggatagccgaaaggatctccggatctgttatatggtatttcgtctctgccagccatgcgccgtatttcgcgtggagaacggctggcgccttcttctcatcctccgtcagcgcaatcttctgcttttcacatttcctgatgatcgtatcattgctgtaatgcttcgcgcagtcatggagcaggccggccagttccgccttgtctaaatcgcagccatagcgcatggccagcgcagccgcagtaaatgatacgctgatggtgtgttcgtatctggaaggcgtcagcttttcacttagtgcgcttctcagctgtgcaatgatttcctgcattccgctacctcctgatataaatgatgctcctgaatgtacctggccaccggcccgggtacgaatgcatcgatcgattctcccagggcggtcatacggcgcagctcggctgaggagatatcgatctccctgcagtgcagcatgcggacatcggcctgatacgtttctttaagataggcaatctgcttttccatggagcggcctgccgattcatattcccgcaccgccgccaggatgacagcctgagccaggaccttctccggttcatgccagtgctcgatctcatagagggaatctgcaccgatgatgaaataaaacgtatggccgggataaaggccgtgaagcatttcaagagtctgcgaggtgtaggtattgccgctccgcatgacttcaaaatccgaacaggtaaacccttcatggccctccatggcaagccgggtcatctccagccggatacggccggctgtcacgttgtggtcctttttgtgtggcggctgtcccgacggcatgtaccagatctggtccagaccgtattcctcataggcctgttctccaaggagaagatggccgttatggatcgggtcgaacgtaccgcccatgattccgattttccccatattccgtaactccttacgacacgctgtacgacaggttatggaagaacaatctttctcttcttctcttccttcgccggtttataaaggacaatttttcttccaatcacctgaaccacctcagaatgggtgcgctcagccagtgttgcggcgattgcatttccgtcgtcgaggcagttttttaatactgtaatcttaatcagttccctcgcttccagcgcttccgcgatggcggcggtaatctccggcgtaatgctggatttaccaatctggaaaatgggctctgtcgtcattgctaagccctttaaataagaacgctgcttgcttgtcatatttcctccatctatcttactacttctctattttatcatttgtctatttataatagtcgaattccaggccgtacatacggacggtatcgccttcttcgattccggcctcctccagttcttcgaggattccgttttcttttaagaaccgctggaagaataaaaagcctttttctgactccaggttcgtatatcccagcattttctcgatacgcggtccttctacgacatagatgccgtcttcgtttcgctccaccgtatacggcagtgtctgatcaatcattgtcgacgggtcaaactctttctcaaagatgaccggcgtggaatcgaccgtctgcagtaaatcgtaaacagcgtataaaagctccttcactccctggccgctgactgcggagatcgggtaaaccttaattcccttcggttcaaattcagccttcaactttgctaccggatcctcgtccccggcataaataacgtcggttttgttggcggcgataatctgcggccgtttcataagctccgggttgtaggcttccagctctttattgatggccagaatgtcctcgatcggatctctgccttctgtagatgcggcatccacgacatgaaccagcacgcgggtccgttcgatatggcggaggaaatcatggccaaggccgactccctcggaagcgccttcgatcaggccaggaatatcagccataacaaatcccttgccgccgtcaatatccaccacacccagatgtggattcagggttgtgaaatggtaattggcaatcttcgggcgtgcattgctgacacgggagagcagcgtggattttccaacattcggaaatcctacgagaccgacatccgcgataaccttgagttccagctggacccagagctcctggccggactgtcccggctgggcatatttcggcgcctgcatggttggagtggcgtaatgcatgttgccctgaccgccgcggccgccctttaagatgacttcccgccggttttcaccggacatatcggctatgactttaccggattcgaactcttttataaccgttccttccggaaccttgacaatgagatcactgccgttttttccatggcagcgtttcttgcctccctgttctccatcctgggcagcgtatttgcgtacctggcggaaatcacttaaggtatttaacccgtcatccacttcaaatatgatatcgccgccgtcgccgccgtcaccgccgtcgggaccgccgcaggggacatagagttcccgtcggaagctgacgtggccgtcgccgccttttcctgattttataaatatttttgctctatcggcaaacatgtattcacctgtttcctttccattggctttttaaaagaaacggcttcatacggtgaggtatgaagccggtctaattattcgcttattactcttggataaacagaaacctgctttttgtctctgccttttctttcaaatctgacaacgccgtccactgttgcgaacagggtatcatctccgccgcggcctacgttaagacctggatggatatgagtgccgcgctgtctgtagagaatgttgccggctaatacgaactgaccatcggctctcttagcacctaacctcttagactcggagtctctgccgttctttgtagatccaacaccttttttatgagcgaagaattgaaggttcatctttaacatcacttacacctcctcaaatcggattttaatatattgtttcccgtatgattccatgatattcgtaaggccgagcaccagagaattcataaggagttttgattccggactgatctctcctgaaaaacgcagctgaaagtcacccgaacgttcatcggcgctcccctcaaaatcgtcttccgtgaaagtctcgatcgagttataagcagagaataccagggctgaaacggcagcacagacaatgtcctgaccttcctcaccgtatccggcgtgtcctgtaagcttaaatccccgtaccactctgtctgaatcttcgaaaactgttactttaatcatagtctctgcctgaattaagcgttgatcttatcaatcttaacctgggtataagcctgtctgtgtccgtttttcttatggtatccggattttctcttatacttgtaaacgatgactttttttgctttgccttccttcacaactgtacctgttacggtagcacctgctacggtcgggcatccaactgctaattcgccgttgtttacaaccagtacctggtcaaatgtgactgcttcaccagcgtcaacaccaagcttttctactttaatgatatcgccttcagctactttgtactgcttaccacctgttgcaataatcgcgtacatatggcacctcctattatcattactcgccaactgtggtgcttcgcgcaaaacacgaaaacttttgaacctcattgtgcggcatactgtatcataataccatttgtcccatgcaaagtcaacataaataaatcaaaaacagcaaaaaaattacgtttttttttaccttgtttttccactttcttcttagtataatggaaaaagtttgatttgagaaggagtggaatcccatgaaaacagatagaagaaaacaaatttttatccgttgctgctacggctattcggtcagcgggatggcggtgctggtgatcggcgcggtcctgccgtcggtgatcgcggaggccggtatcagctttctgtacgcgggaggcttactgtccgtaatggcggtgggcaatctcctctccagctttcttttccctgctatggttcctgtgatgggaagacgtgcttccatcactctgatgacagccctggcgccggtctgcctgctgggatttacgctcctgccgccgcttcctgtcatgtatggcatcatgctggtctacggtcttgtgagaggttctgtcacgatcatcaataacgcggctgttaacgatatttacgacgaaggggcggcaggcaaactgaatcttctgcactgcagctttgctgtcggagcgttcctggcgccgtttctgactgccgtttttctgcggctgggatttggctggcggtcggtggtctgccttttgattgttgtcacggcaacgtctgcagtctcttacggtaccatggattatagtctgttaaatgaacgggccggagattcggcgtttaagaaaaactccggccgtcgctccggccggagtttcttaagatccctgcaattctactgtattgccctgatccttttcttttatcttggggttgaaaactgtatcaacggctggtttgtcacgtatctgcagaataccggcgtcatgagtgagacgtatgcagccaccctggtatcggtcacatggctggttatcatggcaggacgaatggtctgtgccgcgctttccggtaaaatggcgcgcagctccctcattctgctgaacgcgctgggaagcggcatctgctttttccttttaatttctacaaagagccttccgctgattacacttgccctgaccggcttcggctttttcctggcaggaatctatcccacctgtattgcagacgcagggccgctgatccagggttccacctttggcatgtcggtgcttacggcgatatccgccatgggaggcattctgacaccgcagatagtgggaggcgcggcggaccgtgtcggtattgtggcggcgatcagtattctggccgtgaatgtggttctggtaatcctgctctccgcagtgaaccgaaggctgtaccataagtaaacgcttcagttaccttacaccttattttttccatgtagacggtgcaaacaggaaaagcatcgggaacacctccagacgcccggccagcatgtcgaacatcatgacccatttcgacagggcggaaaagcctgaaaagttgccggtcgggccgacagctccaagccccggaccgatgttgttgaaggtggctgccacggcggtaaaattcgtagtaaaatcaaagttatcgaggctcaccagtatggttgagaagataaaaatcaccagataggccaccagaaaggtattgatggaccggattacctggtgctcaaccggctttccttcaatcttcaggaccttgacgcttctcggatgaagcagggagaataattccttttttaccgtcttaagcaggataatcactctggagaccttgatgccgccgcccgtacttcctgcacaggcgccgataaacattaatacgacaagcaggcccttggagaattccggccatttatcaaaatctacggtggagaagccggtcgtcgtgataatggaggcaacctgaaaggctgcgtgatggaatgcggcaaacagactggtaaagcttccacggatattgagcgttatgaggagtacggttactccgataatacccagatataccctggcctcctcacagcgcagcgcatcctttggatggtgaaccaggaataagtaatacacattaaagttaatgccgaagagtatcataaatacggtgatgactccctgcagataatagctgtcgtaataggcaatactgctgtttttgattccgaatccaccggtaccggccgtgccaaagccggtcgccagcgagtcgaataacggcatgccgccggccagcaggaggaggatctccacgactgtcatgaagaaataaattccatataaaatcttagcggtggactttaccttcggaaccagtttaccgacggatggccccgggctctccgctttcatgagatacatattatagccgccggccagaggcagaactgcgaggataaatacgagaacccccatgcctccgatccagtgtgtaaaactcctccatatgagcatgcagtgggacaggctttccacatccggcagtatactggctcccgtggtggtaaagccggagatcacctcgaacatggcatcttcaaagcgggggatttccctgcttaaatagaacggaagggagccgaaaaaactgagtacaatccagcttaacgcgacagagacaaaaccctctttggcgaagaataccatgttatccggtttcctgcgtgtcagaaagagaccggccgatccgcatacggccataacggccagaaaccagatcccgctgctttcccggtaaataacggcaactgcacagggaagcagcataaagatggcttccatattcataatccatcccaggagatagaagataatttttttattcatttccttcgccttttcttactttagtatatcctttaaatcatttaatccggttgtggtggtaacgatgattacccggtctccggcctcaatcacgtcttttccgcgggggcttctgatcttaccgttgcggttgatgcaggcaacgagaagattgtcctttaaccggagcttttccagaggaataccgacgatggccggattgttcgtcacgcggaattccagcgcctcggcgcggtttgccacgatcttatagagcgtttccacattgcttcccatggaattctgcatggcgcgcacatactgtaagatggaatcagaggtaatcagcttcggatagatcacactgcccagattcatggaattgatgacattctcaaaggcgatcttgttgaccttggtaatcagctttgccttcgactggctggcggcgtacagggacagcatgatgttttcctcgtcgaaaccggtcagggatgcgaatgcctccgtctggcggatgccctcctgcagaagcagctcctgatcagaaccgtctccgtggataatcatggctttcggcagcagctcgctgagctcgttgcagcgctcgacgttctgttctataattttaatctgaatcttcgtattttccagaagctttgccacgtaatacgtaatcttgccgccgcccacaaacatggcggttttgatggtgttattgatgattccggcctgtttaaagaattccgtggattccgcaggaggcgcaatgatggagatcttatcgcctgactgcatctggaaatcaccgcttggaatgatgacctcctctcccctctccactgcgcagattaagacggagcagtgcagcttgtccaggacatcgcgaaccttcatggcatggagcttcgagtggtcgggaacgagaaatttgaggatttcaatccggcccttggcgaacgtatcgatcttgatggccgacggaaaacggagcagtctggaaatctccatggcggcggccatctccggattgatggccatggaaaggcctaactcctcccggatataacgggtctccgtactgtactccggattccggattctcgcaatcgtatggcagttccccgcttttttggcaatcagacagcagagcatattcagctcgtctgaattggtggtggcaatgagcaaatcagtatcctgaatccccgcctccatctgaaccttgtaaaccgcaccatttcccacaacacccatgacatcgattcgttctgtgaccgcattgatcaccgatgtgtttttatcgatgactgtgatgtcatggtgttcgttgtttaactgctcggccagggtggttccaaccttcccgcacccgacaattatgattttcatgattctgccttcccctttataagcgcggcctgttcatggaacggcctgcgtattttttttctggtgacttccaccagattcagttttgtaatttccacgactgacgtctttaccgggtcctttgacaaggctctcgacaatactgttaagagttcctgccggtcctcttccgtctccatatcgatgaaatcgatgatgatgattcccgataagttgcgcagccgcagctggcgggcaatttggacggccgcttccgtgttgatcttcatgattgtatcgtgaagattctttttaccggaatacttaccggtgttgacgtcgatgacacagagcgcctccgtgggttcgatgacgagataaccgccggatttcagccagacccgttttccgagcgcctcatccatggctttttccaccttgaaaagcttgaacagaggcagcagggcatcgtcatagaacgtaagcttcttaagatcttccggctgaaacgtttccagataaacctttatggcctcgtagatatcgggcgcatccgtcaccacggattccagagaaccgtgaaggctgtcccgaatatctgctaaataggcaggaggcgtttggtaaaggagacttaagcaggttctgtgaacggcatcccccattaccttgcggtacagtgcctttaagcttcttaattcttccagaatcgcatcaaaagaggcttccggcgcatttgttctcacaataataccgaaatcctcttccttttctgcttccagaatgggttttatctgcttcttccactccatatccgacagcttcgaggaaaatcccagctgccgcttcccggctgtcaggacgatgtaacgtcccgtaaagtttaagttgccggtaaggacgggcgccttagtcttgacggcgtcgcgttcgacctgaacgacgatttcatcaccgacccttaacttcccgtccgctccgcctgcggacgcgtggtgaatgaaaccgtccgcaagatttaaatatcccatgcagccgtctccgatctcgacgaaggcggctcctatgttttttacaatgtttttaacttttccaatataaatattgccgagaatggaacgctcttcccccggttcgaggttcagtgaaacggcagaaccttcagactgaaccatagttaagactatgccgttccatttcgtaatgataagtttattcaactgcttcacctataagccccagaggtaccagattcttaagttcttcatctccgatattgccatagacctcttcacgctgaatgaggaaggcgaattccggacaggactcgccgcgccagcggtcgtacgtctccatgaccagctccggttttaagttgtcctggcttccggcggaaaccttcataaagatgcggccgccttccgtggaaagttcatagatggcgggctttaagtccatctcccgctccccttttttcgtcttctttacagtgataatctggtcctgccggtagaattcctccagtcctttgaaaaaggcttccggatcagagggggcttttccttcgcggaaggtaatggtataatctgcggccgctacgatggacattgcatttttcgcccggtcttccagcttgtggcattccagaatctgaatcccttccaccatcacttcatttaactggttcttcatggtttcgcagtcagtcatggaattgacttcgatgtccatatactctccgttgcttgtaagccccagacccagaggggctgcaaacgacataatctgatgggggctgaagccctcactgtatttgatatcgatggcggcacgccgcatggctttctgaaaataccgcataacatcgaggtggccgataaactttacgggtccctgcttcgaaaacttaattcttaccttcatggcagacacctcctccaaaacgcatcgctccgcacgcagaacatttctgacggcagtttggcgtcaatttttctccgatggcattctgccactctctctttaagaattctttggaaacacccgcgtcgatgaaatcccacgggaatatttcttccaggctgcgttctctcgtcgtatagaaatcgatggaaagtccgcaggtttcaaatgccttcatccagatccggttatcaaagtactcagaccaggaatcataaatggctccgtttttataagcttcctcgatcagtgcgccggtctttctgtcgccccttgcaagaacgccttccaatacggttaaatccgcctcgtggtaattgtactttaagcttttctgattcttcatctgacggaacttatccttgacgatataggctctttcaataaattcctctttcgtacacatacgcgcccactggaacggagtaaacggctttggcacaaagaaggacgagctggctaccacgttgaccttgccgtttcgctgctccttgggaatctcatagtagacttccgccaccttttcggagagctctgctatgccttccatgtcttcctttgtctctgtcggaagtcccagcataaaatacagcttgacacggttccagccgccgtaaaaggcatctctcgccccctgtaagatcacttcttccgtcaatcccttgttgatgacatcgcgcagccgctgggaccccgcctccggtgcaaaggtcagagaacttttcttcacatcctggaccttgctcataacgtttaaggaaaacgcatcgattcttaaagacggcagtgaaatattcacgccctgtcccttaaattcatcgatcaagaaattcacaagtccttccagatacgtatagtcgctggaacttaaggaacttaaggatatctcctcgtgtccggtgcttttaagcatcttatatgcgtaatcttttaaatattccagactgtgctctcgaagcgggcggtatacgttgcccgcctgacagaaacggcagcctcggatgcagcctctctgaatctccagaactacccggtcctgagtcgccttgataaaagggacgaccggagcttcaatataataagcgtcgtccatgttgacgaccagctgtttcgtgatggtctccttcgcatggctgttattgggatggaaactctttatggttccgtcttcgtggtattccacatcgtaaaaagccggaacatagatacctgtaatcccggcagcctgttccagaaactggcggcggcttccgcccttcttcttattttccttatagcagtccatcagttcaaaatatacagtctccccttccccgatatagaacatatcgaagaagtcggccagaggctccggattataggcacacggaccgccgccgataacgatgggatcttcctcactccggtccgcagcgtggagcggaatatgtcccagatccagtacctgcaggatgtttgtatacgacatctcatactgcagtgtgattcctaaaaagtcaaattcgcggatcgggtcctgggattccagggcgaacagcgggatgttttttttcctcatgattttatccaagtctgtccagggggaatagacccgttcacaatagatgtcttccctgcggttgaacatatcgtaaaggatctgcatgccgagatgggacataccgatctcgtaaacatccgggaaacacatggcaaagcggatgtctgctttggccggatctttcattactgtatttacctcaccgccgatataacgggcaggctgttgaatgcttaatagtatttcatcatttaacgctagttttctcatgatttttccttatttaatgtgctgtttacacagtattttactttatgccaagggccagtctgaatcgaaaagagcgagggattccatccttatctgctcctgtttgctcctgtttcacccctttttttgaagaaaatcaggccccttaaaaaataacaatactttttatcccaactgcgcaatgcgggataaaacaatatgctacaaagcttaattataaggcatatccctgtattaagcaacactattcggcagatctctcaaacaacccaaagccgcggtcatattttacatagagcttttccggtatggcctggctggcatagacctcctggcctgtttccaagcgtgaaccgtggaattcttccgatgggtattctgcgttgtttacatctgacacagtccccactttctcaaacatcgttttcgatgatcagcagcgcttccggctgcataagatagattaattccattgtttacagaggtcttctatgaatcgtctcaaacgctgtacattaatcggaatcctctttgtatctgtgacaggcacactctcccatttcctctatcagttttccggaaactgttttctgaccggactgttttctccggtaggggaatccacctgggagcacatgaaactgctgttttttccaatgctgttttactctctgtggatgtctgcctgtctccggaaggaagaaccaggtgtcgtatctgcgctggcccttggcaatctggccggctgtgccctgattcccattattttttacacgtattccggagttttggggtttcatcttctgtcgctggatattctgacgtttctgataagcgtgctggccgccttttatctggcttaccgcctgactccaggcagcaaagccggtaagtatgaaacactgctggcagcagcggttatcctcctgatgctgttattttttatctttacttacaatccgccgggaattgaattattcgcggaaccatagcggtaatcatctctggtcagggaagtgctgcagaggtaagacaggtcctggacgttactcaataaacgagtgactcatgatataaaattcctcctgactgggaaggaatttcttttccatcttttccagcgtatcatcatacttctgcgcttcttcctcagaaacggccataacagagctgtcgtagtaaaaccatttcctgccgtcgagtgcatggggagtgagctcttttaccatcattgctgccggatatttaccattctcaatacagacatgatactttttacagcttttaaacccacggcttacatagttcatgggacttccgaatatgacaatcacgtcatatcccaaccgtgccgcctgttcaaaggaatgttcgagcagcagtttgccgtaccctgccctctgatattccggatcaatactgaccggtccaaaggtgagaatctctttttctgttccggcttcatcaattaatctggcttttgtatacatgatatttccgattaccctgccatccagctcaatcacaaaatccagctccggaatgaaatcctcatgctgacgcatgatatgaaccagataatgctctgtagcccccggaacgtaaatgttataaaatgcttttctggtaatttcttctaccacgctgtaatcggtttctttttcgttgcgaatcatgatcgtgctcattcagttgctcctcattctttcggtctatgggatagtccctgttctattctggtttaatctccggcagctgccggatagaaaatggccggttaataaaacagcgagcccttaagagtccgctgttcctgattttaatcatatgcagtaccatactatgacagcatctgtgacaccacaggccgcagccttgcagccagcataatggcgaggatgcacagcagtccgtccggaaacatggttggcagacagtatactgcaaaaatcgccgcccagcccaccgtgttcggtgtaacgacaacaaaatgtgtaataaaatagaaatacaggatccctgttccgtaatagatcacataaccgatggcagccgcaagcacccatgtccggatcttagacgagtgcagaatctcacatacttttcccatcgcgtatgcagccagcgcaaaccccagaaggaatccaaaggtaggccggatcaaataggccggaccgccgccgcgggcaaaaaccgggaatcctaccaggccgatgaccagatacgtcgtcacgctgtaaaaagcccgtttcgatcccagtaaaagacctgccaggagtacaaacagccactgcagcgtaaaattcatcgtatccataccaaccggaatcacaatctttaaaaaagccccgaccgcgattaacgaggcaaagaggccgcatacggccatgtccttcgtcaattcccttctctgggctatcacaccatttttctgtctcatctgtatcctacctttctgttcttccctttgacagtgttttcatgatgattgtacactttttttttgatttttacaatctttttttcggcgctgccactgcgaaggacagagcggtcaaagccgcagccccttaatatctttgattctggacaggatcatattacagctgctgcttacgacaccgggaagaggatcaatcacttcctgaatcagccgttccatctcctcgccggatgcggcaacagcgtggacatgcagcttgttctttccggtgacacggtaaatctgtgtgatggtttcattctggcgcagcgtctctgtcacctgccccagcgtatccggtttcgtctcaatctcgaaatagcaggacactgccccgctgatcttctgcggattgataatggtggtgtactcttcgatcacgccccgcttttccagtgactgaacccgcatcttgactgccacccgtgagatgccgaccaggctgcctatttcggaataggacatacgggcattctttatcaatagctgtacaatcttctgatccagttcatccaggccttcaagaaacatggtgttctccttctctctcaaaatctcagtcatcattttctaatattataaaatcatttccgccaaaaggcaatccgggtctttgacacccctaactataaaaatcagcgtgtaagccagtaatgacttatatttttttgtcaactttattgtttttatatataggctttttggtctttttgtggtatactatttagatagaggtgatcattatgaaggttagcatatcaaagtctaagaacgcagagtctttctatattaagcagtcttatattgacggaaatggaaaatctacatcaagaaccatacgaaagctcggtacattaaaagatttattagcggagcacggccctacccgtgaggatgtcatgaaatgggctaaggaacaggcacgtatcgaaacggaacggtatgaactggaaaaagaaagtcattgtatccccattgtatttcaccctaaccggaagattcctcatgggcagaggcgcaactttcaaggcggctacctcttcttacagtccatttactacgaattagggctaaaccggatctgcagaaaaatacgggacaaacatcactatacctatgatctgaatgcgatcctgtccgatctgatctatacaagggtgttagatcctggcagcaagcggtcctcctatgaagctgccaaaggatttttagaggcacctgcctatgaactgcacgatgtctaccgggctttgactgttctttctgaggaatgtgatcttattcaggcagaggtctataagaattcaaaatccattctggaacggaatgaccgggttctctattatgactgtacgaacttttactttgagatcgaacaggaggacggcaataaaaagtacgggaaaagtaaagagcatcgtcccaatccgattgtacaaatgggactttttacggatggagacgggatccccctggccttccgtctgtttccggggaatgagaacgaacaaaagtccttaaagcctcttgaaaaaaaggtcattgaggagtttggctgtgaacggtttatcttctgctcagatgccggtttaggctcagaaaacaaccggctctataaccacaccaggaaccgttcttatatcatcacacagtcgataaaaaaacttccggtggaatacagggaactggcgcttaaccgcaaaagattccgaaggctttccgacaaccggctcacagaccttgatacgatcacggaaaaggattctgatgagcttttctataaagaagagccatacagcaccaggaaaatggagcaccggctcctgatcacctattcccccaagtatgccgcctaccagagggaagtcagagaaaaacaggtggagcgggcaaaagccatgcttgcagatggaaatcataaaaaaacagggaagaatccaaatgatcccgcaagattcattggtaaatcagcagttacgaaagatggggagagcgcagacatccggtatgttctggatgaacaaaagattgtggaggaggcaaggtatgacggcctttatgccgtctgcacggatttatttgaagatgatccgggagagatcctaaaggtaagtgaacgcagatggcagatagagacctgttttcggatcatgaagacggatttttccgcaagacctgtatatgtacaaagagaagaccgcatcaaggcccactttctcatctgttttttggcattactcgtttaccggtgtttggagaacaagcttaataagcggtacagctgtgaggaaatcgtttctgccctaaaaggatttgcctttgcggatgtgcagggacaaggttttatccctatatacgaatccacgaacttgacagatgaactgcacaaaataagcggttttgaaaccgactatgaattcctcaccaaaagcaggatgagagagatccagaaattgagcaaaaagaagacaagctagttaaaatttataacgtttcccagaagcaagaaaaagactatatatcaaaacgaaacaacaccgctgtaaaaccctgatagaatgggcattatagcggtgttttgttaaaaagactgtcaaagacgggattataaaatcatttccgccaaaaggcaatccaataattgacactgcctcggtttatcgatataattattacgaaacgtaagttataaattacatatagaaaggtttgcgcgattatgaaaggagatttaacccggggacctgtgatgaaaaccatgttgatttttgcagttcccatgatcttaggcaatctgctgcagcagtgctataatgttgcggatacactcattgtgggacgttttctggggccggatgcgctggccgcagtgggctcctcgtttactcttatgacatttcttacatcgatcctcctggggctttgtatgggaagcagcgctgtcttttccatacggtttgggcaaaaggactttgacggtctgaaagacagtatttttacgtcctttctgctcattgcggcgatctgtgctgtgcttaatctggctgcctttttaagcattggatggattcttctgcttttaaaagtaccggaggaaatacagggactgatgcgggattatttgatggttattttcagcggtattacggcagtgtttctctataattacttctcctgtcttttgcgcgccatcggcaattccgttatcccactggtgtttttagcggtttccgctgtgatgaatatcggtctggatctctggttcgtgctggggcttaaacggggtgttgccggagctgcggaagctaccgtcatatcccagtacgtttcgggaatcggaattgccgtgtattcctggtttgcctgcccctggctgcgcattgggcgggagcactgccggattcgtttttcctgcttaaaagagattgccggattttcggtgctgacgtgtgtccagcagtccgtcatgaatcttggaatcctgatggtacagggactggtcaacagcttcggtaccaccgtgatggcggcgttcgcggtggctgtgaagattgactcgtttgcctacatgccggttcaggattttggcaatgcattttcttcttttatcgcccagaatttcggcgcaggcaggaaagaccgcatccatgccggatttcggggagcggtcttagtctccctcctgttctgtctcataatttccgccgttatctggaggtttgcgcggccgctgatgcttctgtttgtcaatgagcaggagacggcaatcattgcggagggaatccgctatcttcatattgaaggcgctttttactgcggcattggctgtctgttcctgctgtacggactttaccgcgcgctgggaaggcccgggatgtctgtggttcttacggttatttcgctgggaacgcgcgtcgcgctcgcctatatcctgtcttccataccggagatcggtgtcgtcggtatctggtggtccgtaccgatcggctggattctggcggatgcggctggattcgtttattttatccgccgcagacagctgcttctttaaacaggctgcttcctgccgtgtttttgctttcctgctgccttgaccagttcataccagaacacggaagccgcggaggtgaaaaaagccgtcagcagccggataccgtttaagggaaccagctttaaaaacgaatgaacggggctgtagagactggcacccagaagcagcagagtcagggcagccgccagcagcatgacgcggtcgcgtgccagtttacgggccgaacgccaggtgctgtcgcactccgatgagttgaccagtacgagaaataaatttcccagaattacaatggcaagccccatggaacgtgcctgtggcgccgcctctccccgccggagcatcagataatagcttccgaaggaggctgcgaaaaggacaagcccctgaatcacgcttttcgtcagggaagagagagtaatgagcttctccgaccgttttcgcggcggcctgcacatgacgcatgattcggctggctgacgctccagaatcaccgaacaggtcggatcaatcattagctccattaatacaatgtgcacaggcaggaacatgagatcctgaggaacaatccccaggacggaagccaccagggaggccagggcaatgggaatatggatggtgaagatatagcctaccgcctttcggatattgtcgtaaattctccttccatcccgcacggtttcaacaatcgtatgaaagttgtcatccatcaggattaaatcggccgcctctctggacacctcgcttccgcgctttcccatggcgattccaatgtccgcatatttcagcgctggggcgtcattgactccgtctccggtcatggcggcgatctccccattgtcttttaaggcctgaacgatccgcattttgtgttccggtatgacccgcgcaaagatggaacttgatgttaccgcctgccggagctcttcgtctgtcattcggtccagcatctcaccggtgatactgccgccttcacagtcaattccggtctgggcagcgatggccgcagcggtgaagccgctgtccccggttatcatgacaatgcggattcctgctttccggcagagggcgatatcctcttttatgccttcacggggcggatcataaagtcctgaaagccctgaaaacaccaggctgcattcttccagtgattccgggattttttcattcggagaaagctctgccgacgccatggcaatgacccggagcccccggcctgacagctcttcgatcttttcttccacggtctttctctcctcagcgggaagggtacagagagaaagaatcgcctccggagacccttttgcggcgatgatccgcttctcttccaactcccagacgtgccccattctcctggtttcgctggtaaacgcgtattccttcagcagtatgccgctaaagagtgcttcctttgggaaacctgattgatcacagaattccagcatggctttttccatcgggtcatacgcctcagtctcacaggccagccccatgagccgcgccagcccatcgctttctgttttccagggccacagctccttcacttccatatggttctttgttatggttccggtcttatccacacagagaacggagaccgctcccagcgtctctaccgacggcagacgacgcaccagggaatgcttcctggccagccgccaggcacccatggagaggaatactgtgagcactacagggaattcctccggtatcatggccatcgccagggtgacgcccgacaaaatacttttgatcagccgctcctgaaacggataaccggagaggttgccgtaggtaaatgcgctgacaagaagaaacaggagcgcagcgatgccggcacagaccgtaaccagactcttcgtctgtttttgaagcggagtcagcaccttttcggcctgaaggacatggcttcccgcctttccatattcggtggctgcgcctgtctgttccaccagaaccagtgcattgccctgtataaccagtgtgcctgcatagcagaagtccttcttccagtacccctctccctcttcctccgcccgggcaggaacggtatcggaaggccgggcgtgtttccagacccggatgggttcgccggtcagagacgactcatccacacaaaaatcgctgctggataagataacgccgtcggccgggatcttaactccctcacagagtaccataatatcccccggtaccagctccgtactggcaatctccttcctggttccgtcacggagcacggtgatacggggggcagacagatttttaagggcccgcagggtacggtccgttttccattcctgcgccacatcgatggtgatcataccggtaacaaacaggagcatcacggctccgtcccggggttcccccagaataaagtaaataaccgacgcgaccatgagcaggagaaacatgggctcagccatgacgcagagcgctttcttaaaaaagctttccttcttttgcggagtcagttcatttcttccgtattcttccaacagcttttgtgccccggcggttgtaaggccctccgggattccattttttccagtgtccataaggaacctccctaataaaaactaaaaagcgcacctgtggaacatactactgtcccacagatgcgcctgatacccatctgctgccgccgaagcggcccggcttcatgtcgcatgatcagacattgcctgctcagtttgtactgttgatcccgcatcctttcagatggaatgcagtgcaaagagattatcttatgttatcttatgaaggaggccggaaaatgtgacaccgcaaattttcttacataacaggggaatatccacatgatataaaacaggcagagtatgccttctgctatcgcacactctgcctgttgactgctgttctttattctgtatcctgtttccttaaatgatgcgtttacttaaaagagtgaaagaaatccttcaaatcctgcttcgtctccgtggtgagctctgctttctttatgccgagtatggctccttccagcgaatacaggcgatgaagacaggccgtatcgtccatggccttgatttttaaccaggcctggcggcttccgatttcttttaactcctcgtaagttgtgataccggcctgatttaactgttcctccaatactttgccgatattcggcagcttcgccagttctcccataaagaatcctcctttaccgctctgcgaatttttctacaatctttaacagaagctctaccaccttttccatggactgtaccgggataaactcatacttcccatggaagttatgaccgccggtgcagagattcggacacggaaggcccatgtaggaaagacgtgcgccgtccgtgcctccgcggatcggagtgacgatcggttcgatgccggtctcttccatggctgcttttgcaatgtcgatcagatagatatgcggctcgataatcgccttcatgttgcggtagctttccttcagttccagttccacggtcccttttccgtatctctcatttaagtaggcagcgacccgggtaataaattccttcttttctgcaaattttttctcatcaaagtcgcggataatatagtccagatgagcctcttccacagatccggtcatcgtgtccaaatggaaaaatccttcatacccttccgtatacatgggattttcaaacaccgggagcatgttgtggaattccatggctataagaatcgcatttctcatcttacccttggaggaaccgggatgaatgctggaaccgtgaatgtttacttttgccgatgcggcgttgaagttctcatactccagttcacctaaagcaccgccgtctaccgtatatgcagcatccgccgcaaagccggccacatcaaataaatcggcgccgtgccccacttcctcatccggtgtgaagccgatgcggatggttccatgaggaatctcgggatgggccagaaggtattccgccatcgccatgatctcagccacgccggccttgtcatccgcaccgagaagtgtggttccgtctgtggtgataatgtcctgccccctgtagtttaaaagatccggaaaatccgcagtcttcatggtaagtccggtcttctggttcatcagaatatcgccgccgtcgtactgtttcactatctgagggcgtacaccggcgcctgagtaagccggcgccgtatccatatgagcgataaaaccgagcaccggaaccttcttgtccatggtagccggtatggtagcgtatacgtaggagttctgatccacacgcacgtcctgcgcatgcatggcgcgcagttcttctgccagcacctccgctaagacacgctgcttttccgtactcggaataacttccacatcttccttcgactgtgtatcgtaggatatatactttaaaaagtgatttaatacttctgacatcattcatgtcctcctttatcgatttgccagttcccgcgtaatatcctcccaggttacgcccttatccgccatcagaaccatcatgtggtacaggaaatcagaaatctcgtactttacctcctccggatcgggattcttggcggcgatgacgatctctgtcgcctcttcccccagctttttcagaatcttgtcaatgcccttatcaaacagataattggtataggagccttccttcggattctccttccggtcgaggataacggcaaaaacatcttcaaataccttcagcggattcgtctcctgatactcctttttgaccagcgtctggaagaaacagctgcgtgcgcccgtatggcaggcggccccgatctgattgacctttgccagcagggtatcgttgtcgcagtccagggagagagatttcacatactggtaatggccggaggtctcccccttcagccacaggcttctgcggcttcggctgtaataggtcatgagtccgctgtgaagtgtcgcctcaaaggattcctcattcatataagccagcattaaaacctctgaggttctgtaatcctgaacaatcacagggataagtccgtcggagttcagcttaaagtctttccatgccacggtgctttcaaacgtatcggccgggattccggctgcttttaacttctgtttcaattccatacaggaagcggaggacccggtcatggaggtaatgacgccggaaacacggccggaagccgccagggcggcgagcgtcacagcgtcaggccggtctgatgaaaggagaaagatctcctccttctcctctaaccgcgccatctcctcctgtgaagggcaggcagtccccagaatcatgacagaagcgcccaactggctgtattccgccgtccggtccagataagaaaaatccggcagccaggcgtagatcttgtcgtcaccgaaccggttggaagcctccttcatgagatctacgttttcatccacgtctgcattgagaaatacggcctttgcacctgcatagaggtatttttttacatcctcaagcctccggacccgtccgccggtaatcaccgggacgtcggctgtccgggcaatctctttgatcaggccgatggtgcgctcgtgatcctcatccgtctcggccatatcatagagaaacagttcatcggcgccgctgtcaccgtaataccgggaaagtgtgagaacgtcatcttcacagcagccctggccccacagccggactgcctttccctcacggatcccgaatcccggaatcacctttttatattctttcataacgttattctcctttttcaatcccttcgaatgctctcactgcttcctttagattgattctgttttcatacaaagcttttccaatgatggcgccctttacccccgcatcatgaagccgttttaaatcgtccatggacgacattccgccggaagcgatgatatccatgccggtttcctcggtaagggctcttgtggcctccacgttggggcctgtaagcattccatccctggagatatcggtatagacgacatggcggacgccgtactccttcatctgtccgcataagtccgaggcggtgatttcactgagcttctcccagccctcgacagccaccaggccgttcttcgcatccacaccggcaacaatccggtctgcgccgaaccggagcactgcgtcccggagaaacagcgggttttctaccgtcttggtgccgatgatcacccgacttacgcctaagtccagcatgcgttctatggcctcttctgaacggatgccgcctccgatctccacaggcatggagacggcggaaacgatccggcgtatggcttcttcattaaccgaataaccggccagtgcgccgtccaaatccaccagatgcaaaaaagtggctccctgcgattcccagtacgccgccaccttttccggtgagtcggaatatacggtaatttctttaaactttccctgctttaagcggacacactgtccgttcttcatatcaattgccggatataactgcataatgttctccttgtatcttagcatagatgattttctcttccaggacttttttcaaccggttcagccacgaaatccgatccggttttttatgacccgaagacagcagaatatgggccgccccatccccggtaaccgctatgaggaagcctcctgtctcttcgatggaagtaattcgtgcataaggaatgatatcaaactggtaattccccgtaatcacatagtccgctgttacgtagatccgggaacgcggttcgaattccgaggcaccggcaagctgacgtacggctgtctgcatctcttcttcgctcaggacagacattcttttctgttcccgctttttctgcactgcaaatcgccggcattcggaaaatccggtgacgaaaaatacaaccggaagaaagaataccagaagtgttccgtaccacggcagcttttttaaccacgtctgtttcgctgaatccagatagcaggaagccaccgtctgtttaaactcattccgttccatgggagccagtccccacatggtctgatagaattccagcgcatagtcgtaaatatccgtattttcaatggataccgaccggccgcgtatggtaaccggttccggaatttctgtgattccgggattgtgggtgtattctacaagcgcccggcattcctccggaagctctcccgtaaaaagaaccatgaccggctccatcatcagtccgtatccccagtaaaacgtctgtttatcatcctgtgtgctggcaaacggtcccgccagcagctggatgtcaacagagcagtccctgctttcctgaaaggcgttaaacggttccggagccgtattcctggtatggattccatcataccaggccagcagggaaaaggcaatgataaaggcagccgcggcagacagacacgcgatccctgtcagaaggcgtccgatccggaaacgaagccgtccgatccgcctcataccctcctgcatctccaattggtcttccatggtcacagtgttcctttcgtggataatacgtccgtgatcctggaatccgtctgcgtcgcctcgtcaagagcctttgcaaacgccttaaacatcccctcgatgatgtggtggttgttttcccctgaaagctttctgatgtggagattcatttctgccgcacaggaaatggcgtaaaagaactccttcaccatctcggtctccagctgtcccacacgctcggccgtgaacgccgcgtcgaacacaaagtaggggcggcccgataaatcgacggcacagagaatcagggattcatccatgggtagaatcatgttcccgtatcgttttaaggatttcttgctgccaaccgcctccttgatggcggttcccagcacgatccccgtatcctcgatggtatggtgggtgtccacctccaaatctcccttcacctccacttccaggtcaaacagaccgtggcgtgcgaagctgttcagcatgtgatcaaagaaaccgattcctgtctgtaccgtggctttgcctgttccgtccaggttaagcttcagccggatatccgtttcgtttgtcaccctcgctatttccgctgttcttcccatatcctagtcctctcttgtcttttcaaatctgaccctgacagaattggcgtgggcggtcagctgttccgcctccgcaaacgtctcgatatcctcatggatggcctccagggcgtccttggaatagtaaataatgctggacttcttcacgaaatcatccacattcagcggggagaaaaacttggccgttccgttggtcggaagcacgtggttcggacccgcgaagtaatccccaagcggttcggagctgtattcgccaatgaagatggcgcctgcattcttcacacgcgtcatgtcttcaaacggattctttgtcacgatctccagatgctccggagcgatctcattgaccgtttcaatggcgtcagacatggtgtcagccaccaggatgtatccgtaattatccagtgatttttgaatgatttcggagcgggaaagctcctttgtaaagcgctccgtctcttctgacacccgctctgccagctccatgctggtggtcaccagaatcgcggaagccagttcatcgtgctccgcctgagataagagatccgccgctacaaaacggggattggcactttcatccgccagcaccaggatttcactggggcctgcgatgctgtcgatgctgacatggccatagaccgcctttttcgccagcgcgacgaagatattgcccgggcctacgatcttattgacgcgcgggatggattctgtcccgaatgcaagtgctgcaatggcctgggcgccgcccaccttatagacttcagtcgccccggcaagatgggccgcggtaagcgtcacgggattgacctttccgtctctgcccggaggggttaccatgacgattttttcgacgcctgcaacctctgcgggaatgatgttcataagaacggaggacggatacgccgccttgccgcctggaacgtagaccccgacgctggaaagggctgtgatcttctgtcccagaatcgttccgtccggtttgctgtcgaaccagctgtaggtcttctgcttctcatggaatgcccggatattcttcatggaccgcttcatgacttctaaaaggcccggttccaccgccctcatggcctctttaatctcttcctccgtcacgcggatggtcgaagcgtcaatcacggcatggtcaaactgttctgtataggaaaatacggccgcatcgcggtcacgctttaccgtgtccacaatctcctggaccgtatctgaataagcggtataattgttcgggtcccgctttaacaaatctgcgagaatatcctttctggacgcttcgtctaacgcaacaattctcatctgttttcctcctggcttgtatatgggtatttgatcagtccgctgactgcaggtaattcctcaaatcatggatcagccgggtaatccggtcgttttcccgtttcatgctcacctggttgaccaccatgcgggcggacagcgggcagatttcctccagcaccgccagaccgttttccttcagcgtcgttcccgtctccacaatgtccacaatgacctcggacagtccgacgatgggagccagctcgatggaaccgttcagcttgatgatctccacagtctgatgttttttattataaaagtaatcctttgcaatggccggatatttggtggccacccggatcctttcatgatgctttaaaagctcttccgcctctttcgggccgcagacacacatgcggcagtttcccagccccagattcattacctcatagagcttccggccctcctccaggattgtatcctttccgaccacgccgatatcggcggcgccgtactccacataggtgggcacatcgcttgccttggccaggaaaaagcgcatccccagctcctcgtttgtaaagatcagctttcgggagcttttatcccgcatctcttcacacgtgattcctattttttccagcagatccagcgactgttctgccagacggccctttgccagggcaaatgtcaaatatctcatgtcatccctcattttaagtattcagacagcggcacctcatccgtccggtttaagttcaaattcacgatctttacagaaaagcccttctcatccagatacagcaggttggtaatggtggtgcgtgccgcatacgactgataggcttccagcgtccgccccgctttcttaagctgaagctgaaccggtatggaggtatcgcggaaatgctttgccagctgaatcgcctgttccctggactccggttcgaagagaatcatggtgcccactacccggaccggtgtatcgatcttctgcctcgataaagccagcattaagtcgtccactgagattccgaagcctacagccggcgcgtccttgccgaactggacgagaagcttgtcataccgtccgccgtttacgatatagtcgccggttccgtaggtataagccttgaaaatgattccggtgtaatactgatactggctcagcattccgagatcataggaaacgtattccgataagtcatagtattccagaatccggttgacctcctctaaccggtcaattgcccgcagggtccgcggattcctggtaaattccctggcggcctggatctcctctaaagaaccgaacaactcaggaagctttaagaatgcctcctttagctcctggggaatgggctgttccatcaccagctcctccacgccgaaatagttcttgttctcaatcagttcacggagtctctcttccatctcttcatccatgcccgcttcctccagaaggccgcggaaaaaatcgacttcgcccagttccacctggaattctgtgagccccgccgccttcagagcccggatgaccatggcgagaatctcggcgtctgcgtcggaggagtcgtctccaatcagctccacaccggtctgcgccgcttccttgagccgtccctggtagctggtgttgttgataaaggtgcgttccagatagcagaggcgaagaggcatatcctcctctgtaaaatacttggtcacacatctggcgatggccggcgtctcgtcgggccggagcaccagggtatggttatccctgtcgaaaaacttaaacatttccctggcttttacgcttccgcgggattcgttaaaaatatcaaagaattcaaaggtcggtgtttcgatatcctgatatccatacagatgaaaaacctccaggatcctgttctggatcgctgccttccgggtgcattccactccgtaaatgtcccggacgccatccggcgtatgtaataatttgtttgccatagcttcctccgaacgttgctgttcattactttcgcatggtaaagtgctaccatgataacgtgtagtttattataagggacactgctcctcttgtcaatctcttctgtccaaatctttctgaatcatctccagatagtggacaaagatgtctctgcagctgcgtatccgccaggacttatccacttcctcataggtgaagcttttgcgtccgccttcctccattctggtccagaaacggtcaatttcatcgaaaggaatgtaatagacctcatttttcaccgtataggacagaataatgaaggaaataccgccctgctcctcaaattccctcatgaaggcaatctgatgcgggtggatattatgtaagggaaacgtctccacggcgcattccttggcgtcaaagcagacgggaattccctgtacggcgccgatgtagtctaccgtactcttctgatcgaaataggccagtgtgatgtggcggctttccttatcgatagagatgggggtgatcggagtcggcaccttctggattaaggccagcttcttctcacggtagctgtcgttgctgcggttgatgaaatcttccagtgtggagccccgcaggcccctggtattccatgttcccatagcctaactccaatcccggcatattttccggaaggtctgcggaagaggcgccgaaaaggttttgccggaaagataagcaagcggttccggcagctccggaaaggtgacggtacaggaatgaagcatctgtgaccggatattccagcgctttttcgcttcctcattgaccgcactgctgccgtatttgaaatcaccgagaatgggatggccgatggaggccaaatgcgcccggatctgatgcgtccgccccgtaatcagcttgacgcttaacagggtgcagccttccgcctggcccagcggttcgtattccgtcatgacaggaacactcccctccacttccgcagcggttatggtcacctggtttgtgacgctgtctttctttaaaaagccggtgatgacctgtttatccgtcacactgccctttaccacgcaccggtagtacttatgcaggcttctgtctttaaacaccgccgacatgatctgaagccccggcagtgacttgccggcgacgacgagcccgctggtgttcctgtccaggcggttgcagaccgaggggcggaagctctttagctgctctgtggataactgtccgctggataccaggtaatcgatgatgtattccaccagggactcatcggtgtccttcgccttctgggaaagcatgccggaaggcttgttgaccagaagaatatggtcatcctcgtaaatgatctgcagattcacctttttgacttcctgcagcgtatggacggaaaatttcccgatggtctcatcggaaaagaacagcctgacctcgtctcccgtgacaagcttttctgaaccgtcgcactttttcccgttcagcgtgatgtttttcttgcgcatcatcttatacaggaatcccttaccggccagattcaagtatttggccagcagcttatcgagccgctggcccgattcattttcagtaacaatgagagaacgcatctttcaattccccttacatggataaatttttaagcagccggagtgtataatccacgctgccgtcatcctcgtattcctccgccggcttcagactctccagccggtggaaaaacgccttttcatcgagaatgatcttcacgcctgaatccagcttgtggcctgcaaagatctctttcaaacacttttccgcttttgcagtatctaacttcggcgctgtacagtaaagaaacacgccgcccggatgaacgatggccgcatcggccgggatgatggtgtctctggtcgtgatgattaagtcgtacagaatggaaaaacgcccctcatagccggccactctccggtgaaaatcctcggagggcgtcttataacgccagcctgccagaagcggggaagccacgttggccgtgggaagaacggaaaggatcgccatgaccgtcagaatattcttccaggccgtgctgtccacaaaatttctggcggccagctggacaatgatcatgaccgcaccgaaggcgaccttgcctgtctccgcttttttatgatgattccggtatccatactgtcccttgtcgtattttttcacagttgtcattcctttttatcggtatagttttcagagcgctttcatgattcttaagatcatgccgtgaggcataatcttgcagagaagatgaaacgccttcatggaaatgccgtagaccgacaccgttcgtcccatcatactgtcgcggatggccttctttaccactcgcctcggatccgccatgacgatccgcttatagacaggaatctcacccgtagtctccgcgatgtcgaaaaattccgtcttaaccgggccggggcataccgcggtcacgtagatgccgcgaggcttcagttcctcattcagggcccggctgtagctgagtacgaaagactttgtggccgcatagatggcaaaatccggctgcggcagaaaggaggctgaggaggccagctgaatgatccggctgttaccggaaaggtagggaagcaccatatgggtcacgacacagagtgctttgcagtttaaatccaccattccggcttcatcagcgagattgatggagcctacagggccgatctttccaaaaccggcggagttgatcagccatttgacatcgggattctcttcctccagtgcatactgaaattccatcagttccttctggtctgttaaatccacggcaaaaagacgtaaatgtacgggaaccgtggataccagctctttcagcctgtccctgcgtctggcaatgacccagatttcatcgattccgttaaaacggtccgccagctgcctgacaaattctcttcccattccggaggaggctcctgttacaactgcaatcttcataaaaatcccttcttttctttttattttttaacctttttatgaacgtttctaatggtctttttctttcctgtccgcttgtcatcccgctgttttcccggacctttacttcctgctgcctgcccgcttcccggttttgtgcctccgccgtatgcgccgccgcccgagtatctgggacggatcaggcatttcttgtcatatccgattaggtcggtgcggcctgccttctttaacgcctcctctaccagatcgtaattctttggattgcggtactggatgagcgctctctgcatggctttttcatggggattcgtaggaacatagaccttttccatggtacgcgggtcgtatccggtataatacatacaggtggatatggtagagggagttggataaaaatcctgcacctgttccggcatgtaacctaagtcccttaaatattcggccagctcgatggcctcaggcaggccggagcccggatgggaggacatcagatacgggacgagatactgtttcatgcccagctgcgcgttcatatccttatattccttgacaaactggcggtataccttattctgcggtttgcccatacggcttaacaccttgtccgccacatgctccggagccacctttaactggccgctgacatgatactggcacagctcctttaagaacttccggctggggtctgccagtacgtagtcaaaccggatgccggaacggatgaagacctttttcacctttggcagagaacggagcttccggagcagttcgatatagtcggaatgatccgcctttaaattcctgcacggttccgggaacagacactggcggccgggacaggcgccctttgtcagctgcttctcgcaggcaggcgagcggaaatcggcagtaggcccgcctacatcgtgaatatatcctttaaagtcggattcctccgtcagaagcttcgcctctgccaccagcgattcatggcttctcacctgaatgatccggccctgatgaaaggtcagcgcacagaagctgcaggctccgaaacagccgcggttgctgatcaggctgaatttaatctcccgtatggcgggaactccgcctgcctcctcgtaggagggatggtagtttctcatatacggaagatcgtaaacggcatccatctcctctgtcgtcaatggcttggaagggggattctgaacaacgtataaattgtcctggtacggctctacaagacgttttccgataaaggggtccgtgttgctgtactggatataataacttctggcgtattccagtttatccgccttcatggcgctgtaggagggcagagtcagcgcatcgtagacgctgtctaaactgctggttttgtataccgttccatcaataaaagtaatgtccctgacatcgatcccgctgtttaacgcatcggcaatctcgacgacagaccgctctcccattccataggagatcaaatccgcctgggagtcgatcagaatcgaatgctttaagcggtccgaccagtaatcgtagtgggccaggcgccgtaagctggcttcaatgccgccgatgacaatgggaatccgtttatatacgctgcggatcagattgcagtagacaatggtcgcgtaatccgggcgttttcccataacgccgcccggggtataggaatcctgctgtcttctctttttggaaacggaatagtggtttaccatggagtccatgtttccgccggatacaaagaaacccagccggggctcgcccagcacccggatgctctccggatctttccagtccggctgggcgatgattcccaccctgtatccgtgggcctccagaagccgggtaatgatggcatgtccgaaggatggatggtccacataggcgtcgccgctcacatagacaaagtcacattggttccagccgcggatgttcatttccgcgcggttcattggcagataatcgtgtatcatagagcagctccatttctgtttataatatcgtaataatcacgaataaaatagtcggccagactcttcttctccgcttccatatgtctggagaattcatcagccacggcacataccgtcatgccggcccgttttccggccagaattccggcagggacatcctcgaagacgagacaatcctccggaatgacgcccaggcggtccgcgacattcagatagatatcaggcgccggttttccggcagccacctcgcaggctgtggcgataacgttaaaatactctccgatcttcagggaatcgatcaccgcatccaccatctctcttccattgctggtagcaataccggcagcgatgcccctggcccttaaatgctccaggaactcacgggcgccggcttttaacggcacgtggcagcggtatttttcgatggacatatcccgccagatggccttgatgtcttcgatggattctctcagtccgaaccggtctttaaagtagacggcagtctcggaaaaactcatcccctcgatctccttctgaagctccgggggacagtcatgtccgtaatttttaaggaactcgatgtcgatgtccttccacatccacatggagtccaccagcgttccatccaggtcgaatatgaccgctttcgtttcttctatcatcattcctgctcctgatctgtcttatttagtaattccagttcctcacgggtcagcggccggtactctcccggctttagtgtctcatcgagcgtaagcgtccccatggatagtctctttaagtataccacatgacaccccagtgtttcaaacatccgttttacctgatgaaattttccttcatgaatcgtaaggcggatctcgaacaactccccgcagcccccccggcgcacgatttccaaatcggcgggaagcgtctccgttccatcggaaagggtcaggccagccgccatgcgctccttcgcgtcttctgggagcattccctctattttggcgtaatagaccttatccacatgctttttcggtgagagcagacgatgggccaaatctccgtcattggttatcaggagcaggccttcggtgtcgatatcgaggcggcccacgggaaacaagtcatcccgcatcctgccggtaatcagatccagaaccgtcctgtgccgtcggtcttccgttgcggagacgacgccctccggtttatggagcatgtaatattcgtactctgcataggccacgatccgcccatccacggcgaccacatcggaagagggggaaatcttccgatcactctttttctctgtcacactgttgaccgtgatgcgtccctttcttgccatctctttgatctggcttctcgtcccctggcccatctcagttaagtatttatccagtctcataagttccttcatcacatccaccgccatcccggataatatttattcttaagtgccatgcccgttccctttgcaaagcccagagggctgccatccacgcagacgaggcaccagtctttgaccggtccttcttccggagccagggagatggtttccccctttaagtaccggatgacacggtcgtcctccctgttccaggagatggtccggcgaaattcatccgccttcagggtcatggcgagagcctgtcccggttcaaaccgcctgtttttcagctctccaagcagaagccccgttctcagataacggagttcctttgccggaacgaaatcctccggcagatagtagacagaatcatttttaatcatgattctggaaggatcaaaatcacggtcgatcagggagagaaactctgtgagctccgccggaaggggcgctgcctttctgctttgaagtccgtttaaaagggcggctgtccgctgcctctccgaaccgccttttttatgcagcagcgccataaaatgcccttctcccttaatcttatgagggaacaggcggaggcaaccgttaagcccgattccgtcagacgccccttcgaacagagggagttttaccagctccatctcctcgtggcggttcaggatatggcagatgatctcctcatcctcacagcgggaaaaggtgcaggtggaataaagcaacaggccgcccggagccagcatgcggactgcctggtccgtgatctccttctggatcctgctgtaatactccggcccgtgctcttcgtagcttttaaccatatcctcgtccttgcggaacatgccttctccggaacacggcgcgtcaattaagattttatcaaaccatggtccaaatacacctgccagcttatcaggcgtctcgctggtgacgcagatattggcgatcccccagagttccaggtttttaagcagggcctttgccctggaattgctgatatcgttggagatgaggacgcctttccccgccagcttaacccccagttccgtgctctttcctccgggcgccgcgcataagtccaggacccggtctcccggctccacgggcagcagcatggccggcgtcatggcactgggctcctgcaggtaatagaggccggcataatagtaaggatccttggccgggcgttttgtcccctcataataaaagccgttaggaatccagggaatcttctttaaatcccaggggaccagttccggaaatgcttccggcgaggtctttgccgtattgacccgcagtccgtacagccgctcctcgtcaaagctttttagataggcggaaaattcctcttcccccagtaagtctcgcattctgtttaagtactcttccgaaagtttcaattcgctcacgtgtgcaactcctgtctttctctatggcatagcgtgtcagaatcatgatcatacactatggcaatcttaatatactaataggaatatttcaaccggtatttctgcagatattttaatacccagtagggattgatactcatttcatcttcatggtccgtcttcatatagatcccgacatgaagatggacctcaaaattgccggtggttccttctactgtgctgtacccggtgtcgcccataaatcccagcagttctcccgcctttacggcatccccctcctgccactccctgctgtagccgtacaaatgggcgtaatagagataggctcctcccggagcacggattccgatccgccacccgcctttctccagccatcctactttttccacgactccgtccgacatggaaacgacgggataatatccccggggccgttccatacccatgatgtcacagccttcatggccgcgttcccctccgtatgtacgcttatccatccagccgttttcaaacgtgacgggaggagaggcggcattcgtattttccgggatgggaaagaactttaaatcgccaagaaccgtctcatacgcctgtttcagctttcggtattccgctggtttcacggccagcagccggtctgtatggcagatggtatccttactgtcagtcaggtcgtaattgtgctctatcatcagggaggttagaagatcgtaatcgatgggacccgattctgcgattaagttccccagcttcatgctgcggaaatcgtcgctctcatacgtataggcgtccagctggtaataggtggggttattgtaaaggtaatcgatcatggtcacatgaaagaaggaaagaagcaggattaaaagaagaatcatcatcatatcgatacagcctcatcatatatttgtataaaacaatctattcaggtgctcatgaaaaaatccttcttccgcttctgttcggttgcggtgctctgcattcttctgttaagtccggcggccgcgtcccagggggcaaaaaacggactggttctgtgggcaacggtagtacttcccacactcctgccgtttatgatctgctccaatgtcatcgtcgccctggacgcgattcatattctgacatttcccttccgcgggttccttcggaatgttttaaagctttccgactcaggaagctatattctcgtctccggtctcctctgcggctatcccatgggagcgagaaactgcggtgattttctggatggggagcggatcacgaaggcggaagccagatacttattaagcatctgcaaccatcccagtcccatgtttcttctgggctacgccgcttccgagctgccgggagctgtccccgtatggctgttaatggtctccgtctatttaccggtatttattcttgcagggctgtcccgaaaagtctatgggatacaggcggtctccccgtcgcttccatatgccagggaggcacagctgacctttgacgaaagtctgatggattcctgtgaagtcatggtgaagatcggcggctatatcatgctgttttcgattctcgttttttatattacgggacttccgctccataatccggccggaaaagcggctctgctgggctttgtggagatcacaaccggaatccgcgccatctccggggcaattccttccatggcaggcggcatgtggatcgccgccgctaccgcatttggcggactgtcaggaatctttcagacaaagagcgtcataaaaaatgccggattatccatccggcactatgtagcatggaaagcggttcacagtctgctttctgcggcaatctttattctgttggcatactgccgtcgccttctgtgggcggcataaccgctcccgtcaattcctgacggttggaggagacaatatcgtagctggactgcatggaagtcataaaggcgtcaaatctgccctgtgctccttccatggagtggctgatgatggtctgaaggctctttaacatatcatctgtgtactggacggcgctctggcggatatcattggcgtcagagacggctttttccacgatgtcctgcgcctgtaaattggcctgattgatgatctcgttggcctgggcatacgccttctgcatgatctcatgctcatttaccagttcatccgtatgggcggaagcctgggcgagtatagaatccgcctgctgatgagcttcgtttaagatcgcgtcgcggttgctgatgattttctgatactgcttgatctcatccgggatgcgaagacgcagctccacaagaagctcttccagttcgtcacggtttacgacgatcttgctgttggaaagcggctggtacttacagccgtcgatatattcttcaatttcaccaattaactgttcaattctactcatcataatgcgtctctctccttacccgtttttctatctattctattttctatctgccatctttctcctgatgcattctgccacgctggcaggaacgaatgcactgatgtctccgtcataaaatgcaatttccttgacgatgctggaactcaaataggagtattttaaattcgttgtcaaaaatatggtatccacttccggcgcgatcacccggttggtctgtgccagctgaagctcgtattcaaaatcagtgacggcccggaggccgcggatcaccacgtcagcctgattgtcgcgcacaaaatcgattaaaagccctgcaaaagccttcacttccacattgcctaaatctttcgttatttcctttaacatattaacacgttcttgaacagaaaacaacggagtttttgaattattattcaaaactccgataattaactgatcggacatccgcgccgagcgctcaatgatatcgagatggcccagcgttaccggatcaaagcttcccggatatacggccgttttcataaaacctctccttttgcgataaaaacatgtttattcgtcttatagattttttccctgcggcactcgagtcccagggattccagataatcaaaaccggttttcagatctgcctccacgatcataagcgtgtcctctgaaatgagaggggaggctgacagaaaggtaagaacctggcgctctaattccttaccgtagggaggatccatgaagacgtaatcaaagacgtaatcctttccctccaggcgcttaaggccagttaaaacatcgcagttcatgacaatggattcatctgtaaacttcgtagtctgaaggttttcccgtatgcattctgcggctttgggattcatctcgataaagactgccctgtcggctccccggcttaaagcctcgatgccgatgccgccgctgccggaaaagagatcgagaaaggtgctgcccggcagatccggatttaaaatgttaaataaagtctctttgatgcggtctgtggtgggtctcgtatccagaccatctatggtttttaaaagaagccttctggcttttcctgctattactctcatgaaatggtgtccctcattcttcttgtattatgttccattatagtatgaaaacggaagatatacaacccggtaacagtaaaaaagagccttcagttttaaactgaaggcccttccttattgttttttggcttatttaccagccatctgtctttcctgagcttcgatcattttcttaaccatatagccaccaacagaaccgttctgtgcagaggttaagtttccgttgtaaccgtttgttaacggaacaccgatctcgtttgcaacttccattttgaatctgtccattgcttctcttgcttctggtacatttgttgtgttagaagattttcctgacatattgatatgcctccttttcgtctatcaccatgcttttgttttgtgtttttcatggtgtgttttgtgctacactcctattatggctctgaagaagaataatacactagaaggtttttccaaaatttttgtcaaagaatgctcgtcatataccatagtgctatgagaacagccgcgatgaaagaaccgtctgcaagccggtaatttctcttcctttctttttctatttcatgaaaagcggccgagtccagaatcgtggttttcccggacgaaggagcggagatggaacgcgctttttcccattcctggctccagtcgatttttttacctgatatacggcttaccgtatagagaaggatcagaatcagaagtatggcaagcagaagccatggaagcagctgtgatgcggaagccatggaacccgttccggtaaattcagggagtgtgccgggaacgtacagttccacaaggcacaggacaaccgtgagggcggattcaaaaaatactggtgtcatactgacaagcagagaatccgtaaactcgtataagagtcctagacagattccaaacaacacgtacccggccgctgtataaggattgaggcaggtcagggcaaacagcagagaactcagcgccagtgcggaaatgatgtttttctgcttatacgtatcataaaacaggatacaggcaatcaggctgtaaagcatatttctgaaaaacagaaccagagacagccagatggaacctgcgcgggtaacattatttatcagacctgcaggtgtggggaaaaaagtcgtagtgacggttatgctgccctctacaatcacatagaacaaaagaccgatcactgcagcagccagataaacgcgggcaggcgcaggcgtaaaatgaagatgttttcttacgaccgccctgttttttccggcccaatacagccaaagcgcagtgtagccgatcactgaggctggcagcatcagcatccactgcggttttgacagcgcaaaatagagcatgttgcagataaataccatgataaaggaaaataccagtgctttgataagctgtctgtttagctttcttacctcacagacaacgtccatactccaatagtctttggaaatatcggtaaactgataccctgatttttcataaccatcgatctgctccagcgttttttccacatccggtgactttccgtctaaatcctgtttcctgagttcttcacaaacctccttaatttttgtcattcttaccatctccctttctgtgttggaaatacattgttccatgcagctttccagggacagagtccggtcttccagccttctgatatcttcgatggatacgttcagcttccggtacagtctgattcgatgaagtgtctttacgtcgtctgcagaatattcccggtactggttctccggattcctgcgaggcgtaatcagcccttctctttcataaaaacggatattctgacgggtgatgcctgtcagctgttccacctctttaatcgtcatcgcactccgcctcctttcagcctcagaataaggggtatacagggtataatgtcaagacttatatgagattttcctttatattttcttccatatgagcaaattgaacctgcattcctaatgcgcggtaaaaggaaaccgcgctttcgttaaagttccagactgtcagttccacactggaggctccagacaaagctgcggtctctttaacttttgcatacagcatacggcctattccctgacgacgaaaagattccgatacaataaaatcttctatatacagaattttctttttgcggagcagcggggaatccgtttcggtcagttttgcaaaacagagacctgctgtttcatcaccgatggttttggcagtaaacagaaaaaatgagtcatttttctgcatggcctcatattcttccactgtcaaaagttcatcgcatggctgaaatacatcaggacgggccaatacatgcattgcgtgctcttcagcgatcaggcaacagattgaggagtaatctttcggaactgctttttctatacgaaatgggataggattcatgactgcctcccaaatacgttctgtacaagatattgtgcccgctcatactcctttttcgacacataaagatagtactgtctcaaaacggattcatccataaatgcagtccccagcgtcctgcggccccggcggccgcaggacggtacagtcttccagtcatacgggatatgatttgcagccagaatatcctttacacggttaaaatcgttcagtgaaaatgtaaccagaacttcttttttctgccagaataacattgcctgtgtcctcctatcactctatggctctcccagtattttttcaatcgatgtccggaccagctggaaggcaacttcgttcattccgctgtttatgataatatccgccagcggcttggtcggttccacgtacaggtagtgcatgggtttgacggttgttaaatactgttccaccacgccttcgatatcccgtccccgttccttgacatcccggatcacacgccgcagaatccgttcatctgcatccgcctccacaaaaatcttgatgtcgaacatatcgcggagccactggtcggcaaagaccaggattccctccaccagtatcacctttttcgggtggaccgttaaaaactgatccgaccggttgtgccgggaataatcgtacacgggacattggacggttttcccgttcctcagcccggccagctgatccagaagaagctctgtctcaaaggcctccggatggtcataattcatcttttttcgttcgtcgaagggaatgccatcctgttttttatagtaattgtcatgataaagcacagcgatatcatcgtgaaatgcatcctttaaccggttggtaaaggtagattttcctgaaccggtgcctcctgctattccaattaatacgctcttcatagttctattcctccaatgtcttttggtatttcaaacactccagatcttctttggtgcatccctttccataacgcgccttctcatatacctgatgatagaccgcacaaagggaaggctcctccggcaagccgcttttttgctccagctcctccggcgtttccgtacgggaaatacggtttcttccggcaagccttcttaaaatctcccgtttatatgctctgcggattcttccctctatcgtaaaatctctccacagaggcgtctccttcgtccgctgggccccggctctgctgaacacggcagcaggctttataaactccttttcatccccgtcttctctcggctttaagaaacggagcagcagaaagaacagctgtctgagcaaagcggcggcgagaataaccaggactatgacggagatgacggtgacagccgcatccagaatttttgcaaaaagagagggacccgcagccgcctctcccaactcgggcggaataaaactccctgcaggcatggattccaccggctcgtttactgcttccggaagaaaatgggccagaaaccgaagcagcgtcgtcaggacagactgaatcccatggatcagccagtctgcgcggagtaaggagaacaccgccataaaagcacccgcggcagccagaaacaccgccatgtagaccccatttaccagcttcatctgtgatttcgggatatgatccgtcgacgggtgcatgcttaaaaagttgtcacaggcgtggagctgtaaatggagcagaaagaaaaggattgtcagaaacaatccggcatatccggcggtcataagccgggaacttggaattaagtatcctgcgccatacaggaagacgcagaggacggctgccatgatatggattccgcttaaatcagcggtaatccaccggttgatccatttaaattttgtcataaggcacctcccacttcattgcaagcgcagccggacagagggaaagcgtcacctcgtcctccggccgcagcggggcaatccataaggagcccgggctgtaacggcagaattcctggtatgcggtctgtaactccggccgtctgcaggatgagatcatgatatacagacagtcttccgctttcttttccaggctgcattccctcataagcgtctcaaagggagtcatcggaatgtcgtagcggaggcggctgagcgcctccatacaccgggtgacatggctcactcccgctccggccggaacgaaggatggttccccgatcaaggcatccattccgttgctgaaaaatccggttggaattccttctgagacaaacgcgccgatgaaagatccgcagattgagacggcttcctctctgagagcctccgacgcccacggatagtctgaatccatattcaggaacagaaagatattctgtgttgccgtggactcgtgaacgttgacctttaaggcaccggtacgggcggtggccttccagttcacgctgtgcatggagtcgtaggtctgatattcccggattccctttaactcaaagggatcggcaaccagcctgtttctcgataaacaggtacccatcatcttctggaacggtacattcagacggctgtcgtccgctgccgccggatagacgtataaatgagaatccagggacagagtctcgatgagatggccggaaaagaacagatcgtggcttaccaggtccagacttttgatctcgtaatagccgcgtttgctgcagtggaacgtaagctttctggtaatcttctgataagggaagaccgagaaaacatcgttgcggtacgtatagtcggatacggcggagttctctcctgtgacgaattccagttccctgccgatgcggaattttacccgcagaatggaaagcggaagaaatttcgcattgatgacagtttcaaggagatatgcctcgctgccgcagactgcaggattgtcctgaaacgctgcatccgcagtcagtcctttcttccagaaccgctcgtacagggcgcgctgaagaacgtagagaatacaggccccaagggccatgaggatcagttccatttatacattccactcctctgtaggtacaaagacggtatttaaaatctgttcaatcacctggcggcccgtgcttcttccggtcagagtcctggcgagaaccagcctgtgggccaggacgggaacggccagcgcctttatatcctcaggaaccacgtagtcccgccccttcaccagggcataggcccggacagcccggtaaaaggcgaggctgccgcgcgggctgacgcccccttccacttctccgtgctttctggtagcgagaaccagttcgacgagataatccatcagctgcggatggacgtataccgcttccgcctccttcatcagcgccagcagtgtctcccggtcacagacggcggtgaggctgtcatagggattctctctgccaaaacgctcaagaatctgcctctcctccgctgcgtcgggaagtcccatgggaatctgcatcagaaaacggtctaactgggcctcagggagcggatacgtccccgctgtctcgatggggttctgggttgcgatgacgaaaaacggctcttccagcttctttgtctccccgtcgatggtgacctgatgctcctccatacactccagcagactggactgtgtcctgggcgtggcccggttgatctcatcagcaagaagcagattcgtaaacacggggcctctgcgaaagacgaattcaccctccttctggttgtaatagttgagaccggtgatatcagacggcagcaggtccggcgtaaactgtaccctcgaaaaggaaagctccatgctcttcgccagagattttgccagaatggtcttgcccgttccgggaacatcctccaaaagtacgtggccgcctgccagaatcgcagagagaaggcagtccgtcacctcttcttttccaaccagtacccgtccgatatttgtcttaattgcttcgatcgcttctttcatcccagcgcctcccaccataaattggatctgatgatctttcctgttattttatcaaattaaccgcaggcatacaagaagaaccgcctctttccggataaagaggcggtcatttttcctgttttcctgtgattcagttaatatgtggttcctgcatcctcgtaaaccacggacaccggctttaatcggttatagtaattggcaaacgtaaccgtcatatacggatagacgtagatgtatgccagaccgcaggtaacactgcccagcagcatccagaaaaagaatgagatttctaaaatgaagtattccatcttgtgtccagccatcatctctttgctttcacggatacactgcatcacacctttatcgggattctcaaccatgatgaagatggcctgggaataacggtacgcagcaatgatacccggtataatcagcagcagacaccacagcataacaaatattgagatcataagcgtcagtccgatggccttcagcagatatttcagcgacgaaaacaaatccccgtaggacatggaactgtcccggttcgccaccttcaaacagtaggagctgtaaccaaactgcagaattgtactgatcaataagtaaacaacaaaaaatacaatagaggaaacgacgtatgtactgaattctcctccgctgacggcagttcccgaggagatgagctcaccccagacattgagaaccacctgaacaacagacataataacgatgatgactcccatgatgatggtaaccacatagggatttacagccgcctgccgcatcttttcctttgcatcaaattttaactcctgtctgttcatataagccctccttaattgtaagacagatgccgttatatttttaacaacataagtttaccatgctgccctgttaatttcaaccctgtatttacagattcagcttgtcatagcttttctccaaataaaggctgagtttttttcccagctcaatatgctcctctgaggtgagttccggatcttcgtcaagcagacggttgacctcttcggatacggtctttaagatgttggcatcggtaaagatatcggccagcttaaactccaagtctccgctctgtctgagtccgaagatatctcccggcccccgcagctttaaatcctcggaggcgatgtaaaatccgtcattggatttactcaatatggtcagacgctccctggttccttcctgaccggaaccatccacgagaatgcagtaggactggtgctttccacgccctacacggccccgaagctgatggagctgggccagtccgaatcgctccgcattttcaatcatcatcacggtggcgttgggaacgttgactcccacttccacgactgtggtggagacaagaaccttaatctcccctgcggcaaaccgttccataattgcgtttttctccctggccttcatcttgccgtgaaggtattctactgaaattcccggaagtgcgctctgaagcttttgggagtaatcgagaacgttctccgcctcaatcatctcactggcctctaccataggacagatcacgtaggcctggcgcccggcggccacctctccctttataaaggagtatgccgtgctgcggtagctggtgtctacgacacagttcttaataggaagccggttggccggcagctcatcgataatggagatatcgagatcgccgtagatgataatagccagagtcctgggaatcggcgtcgcactcataacgagtatgtggggctcatcccccttgtctcccagcatctcacgctggctgacgccgaagcggtgctgttcgtcggtgatgacgagggcaagcttatcgtagactaccttttcctgtatgagcgcatgggttccaacgatgatatccgcctcatgggaggcgatcttttcgtaagcagtacgcttctcctttgccgtcatggagccggttaccagcacgacctgtttctcaatgccgttttcttcaaacagggagagcatggactcgtagtgctgacgcgcaagaacctccgtcggcaccataagagcaccctgaaacccgttgcaggcggtcttcagcagagcgaggacggcgattatggttttaccggagcccacatctccctgaattaaccggttcatcacctttttgccggtcatatcgcgaaatacttccgtcagtactttgttttgcgcattggtcagcgcgtaggggagattttttacaagtctcatcacttcatcggatggcttcatcggaaaatggctttcccggtccacacgcctgtcctttaggcggcgcaccgccatgagaaacaggaaaaactcatcgaaaacgaggcgctttctggcaaaaagaagttctgtccggtctgtgggaaaatgaatatgctcgatggcaaaattatattctgccagttcatggcgaatccgcaaatccaggggcatgtaatcgcggaccatctgtcttgccgacagcgcctgtttcactgcccgcacaatggtcttgttgggaagtccctttgtctgtccgtagatgggctgcatggaatgaatgacctctccgtaggcatctcccagaaagatctccggctgttccatcgtaaggcggccgttcttcttaaccacgcgtccgcggaatacggcgcgcataccggcctttaaggtggcgtgcagatagggcatattgtaccaggtaagcgtcagggagccggtaatgtcccggatcatggtggtaatcacctgaatatggctgtaacgcttcacctccgcgctcttaaacagcactccggataccgccatcacggtatccggcttcagctcgccgatggacaccggctcctcgcaggcgtcgtaggcccgtggatagtattccagcagttcatccacggtttcaatccccagctttgcaaacagcctgcctgtcttttcaccgatgccctttaagctatcaagcggttgtcgattcatgtttccttcacctttcacatcatatatacaatacagtaaaagttcccggacagttcgtctgcccgggagctaattctgtttcttctgttttactctacggatatcagataatagtagattggctgaccgcccggatgcagctctacttcacagtcgccgaaggaatcctcggccttttcgcgaagcgtttctgcatcttcttctgacacatctgcgccgtaatagatggtaatcagctcagattcttcatccaccatggacttcatggattccagagccgtctgctcaatggctttcccggccgccaggattccgtggtctccgagagccataatgtcaccctcggtgatctcgatgtcatcaatcgtggtattgcgcaccgcatacgtaatctggccggtctttacgcgctgcatctcctcggtcatcaccttctcgttctcttccgcggataaatcgggagcgaagttgatcagagcggtaattccctgtgggatcgtcctggacgggattacgatgacatgcttatcctttgtaagctttttggcctgttctgccgcaagaatgatgttcttgttattcggaaggatataaacggtatcggcgtttacccggtcgatggcatttaacatatcttcagtactgggattcatggtctggccgccctggatgaggtagtcggctccgattcccttaaagatctcgtcaagcccctctcccactgatacggagatgaatccgtaaggctttctcggccccgcgtccttctcttttgcctctttctgtgcagcagccagcttctctgagtccttgatcagcttttcctgatgctcttccctcatgttatcaatcttcatgcgtgacagggagccgtaggtcagcgccttctggatcgcaagtcccggatcattggtatggacgtgaaccttgacgatatcgtcgtcggaaacgacaacgatggaatcgccgatagactctaaatatcccttaaaatcgtgttcgctcttctcgtcgtaaggcttttccagatttacaataaattcggtacagtagccgaacctgatatcgaaatcatcggtcaccgcagcaccgccggatacgcctgcagcgctcttaacgccttctacggataaatccagttccttgcccatcagacagtccagagcgctctttacgacctgcataaggccctgtccgccggaatcgacgacaccggcctgcttcagaacgggcagcatctccggcgtctggctcagcacgtaatcgccgtgttcaatcaccttctgacagaattcgatgatatcttccgtctccgtcaccagttccacggccttgtcggccattcccttggcgacagtcaggatcgttccctcctttggcttcataacggccttataagccgtctccgtcgccctgacgaaggaattcgcaagcgttgtagtcgtgatcttatccaccgtctttatttcttttgtaaagcctctgaaaagctgggaaagaataacgccggagttgccgcgggcgcctcttaatgagccggaagaaatggcctttgccagagattccatgtccggatgttcgatggccgccacttctcttgccgccgacatgatggtcatcgtcatattcgtacccgtatccccgtccggaaccgggaatacgttgagttcattgatccattccttcttagcttccaatccttttgcaccggccaaaaatgctttcttcagcatctctccgtctatatacttcatacccacaggtagtttcctccttaatctatcactcttacaccttcaacgaagatgttgatcttatctaccgtcatgccggtgaattcttctactttgtacttcacattttcgatcagattgtcagcaactgccgaaatactgattccatatgctacgatgacatggaagtcgatggtgatatggttgtcctgtatattcacgttgattccgtgcgtcagactttcgcgttttaaaagcttaacaaggccgtccttcatgctgacagccgccatgccgacaataccgaaacattccactgcggtagtgcccgcgtacatagcgataacatcagggccaatctggatttcacccagtttattgttgatgtaacccttcataatttttacctcctatcattctgactgatttgattatacattattttcccaaaaaaagaaacaaatttttaaatttcacttgcaaaactatgcaatttctgttatcatacatttgttgtggatttttataacagaaaatccaagtagcgtttaaggaggtgcaaacatggctaaatgtgcaatctgtgaaaaagctgctcactttggtaatgcggtgagccattcccatagaagatctaacaagatgtggaaagcaaacgtaaagtccgttaaggttaaagttaacggaggcgctaagaagatgtacgtatgtacttcctgcttaagatccggtttagttgagagagcttaatcatttaagaaagaaaactccaggctgttgtcagcctggagtttttgatatcataggtggagaaacagctggctgccagggcagttcggctctttattttaatcggaaacgggcaccaggacacgtctctcccgtttccaacaatcgctcattaccagcagaataagttatatcccagaaccatacaggcgatgatgaataatatcgtcataattgttgccgggataaaaagcagaattgccattcctgcaccgaagcagaacagcatcagaccacataccctcttcatatcatccctcaatccgttaccatgctatatgatatagtatgcggcttatcctattcttattcctgatccgtctcttccgccgcagccatctcctccgctactttcagtgcatcaggggatatgtcatgggatccccctgtaaatttattcacgaagtcaggcaccatgtccagaatctttgtcatggcatcctgctgtttgatgttgaccagcttagtcaccccgttctggatgattaaaattgcgctgggactcatctttgcattcataccgcctgcgcccttctgttttgaattctcagcaaatgaaccggcagccataccgcaggtcacatccaccagaggaaggatgatggtatcatccacctttactgcctctcccactacggtttttgttgtcacaaaggtatccatacccttgaacagagcctccactgtagaggtaaaataattatctgccatctgaatagttcctcctcgctatgagcactcagcgtgccctgttttatcggacatgacggacgtgtgttgtccgcttaccgaagccatttccttaaaaggcctctgaaattcttatcgagcagcattcttcccgcgatgagaagcagtgtgcctgcccggattcttccgctaaaatgtccctccgccgtaaatacctgtctgtcaaactccggatagatatcaatcagcttatggcagaacggataaaccacgctgaccgcagttaagacctgtccggtcgtataaggatcgtcaaagccgaataccacttcgccctttccctttcggggaaggaggtggcggaccagtttctttaactgctttaaaagaaggcggatggtctttctgttattttcatcggtaatccatgcctgaatctcttcttttttctcttttatggcttttagtttatcacacatccccttgaaagaaaacttaagttttgcgtaaattgacgaaagcctgtcggcagttttcccggctttcccgtttttttcatcgcttgcctggctggcttccctttcccggccggggtgtggttcctccggcaaaggcacttgctttccctcttccgccagctgctttttgccggatttttctgcatcgcttaccagatcgccggtaaattcttcggtttcccggtccgtcgtttccatggcatgaaccatcatatcttcggcatcttccctgctctcctccacaggcttaaaaagccggaagccaaacaggcggatcccaacggaaaactcgtcttcaaaggctgccgttacagaaacaatatgtagcagccatgtgatgcgggccttccccttcaactgttcataataggagccttcgatccggtatctgaccggtacaagaagaatcagaaggagcactccgagaacgagtcccagcagaatcagtaccagaattcccagcagctttaaaataaataatatgataggaagcatggacacctcacatcctgccggcttccggaacatgttcggacatgccctgagccggatcgtcacggtgactccttcgcagcggccggccgtttaaatatccggtcaagtcgaagccgccggtattctgatacagctcctccacgatctgtctcgtcacctctaaggcctcccagtagtcggccgcaattccaataataaagaactcatcttccctgtaccacggggcagaaagctccatggccggatagatatcaagtacattattcccacttaatgagggtgtaatcacataagcccccgaaatcaggcgggaatttctgattgactgtatgatctgataacgcttttttttcgccttgtcacccacgtacaagtggtcataccagcttattttcatattccatcagctcttccaataattccttgcaggtttctttttccgcctcgtccccgcagctttccaggctccctctgatgtaagacttaatctcgtcgatcgaatgaaagtacaccggaagatccgacagtactttcgccatgatggcgcgcatgaccggcctggaggtgtcggaaaaaacggtatccagttcactgaaatacgcttccgcggttttttccagatacgcgcggtctaccagcttcttaagttcgctctcctttggatcattctctgcggcagtcttctttaaactcataaaagagcttccggaaaggagaagatcaatgttgcgggctctcacataatccggatcagcgagcagttccggtgtctccggcggaatttccgagcggagatatctctcgtaataggcctcctgacgtccttccatctgtgtgagaagcgcggcaaaggagtcagccggttcactgccgtctttcttcatcagattgtcctggacaccggcgatgatggaacgatagagattttcctcgttgacatcaatgaccgcatcgcttttcgcaagagaaagaacgtataaatcattgatgatttcctgaaggcttacaaagcattccgcttcttcgtttaactcggcgcttacgcccatcagcttcgcctgtgcttccgtaaacgcctccggggaaaggctgcggtaatccatatggccgaactgcatcagcgtctcatacagggccctccgcccctccgccattccctccggaagggacgccatggactcggtcctgagcgtatacatcatgtcatgaaggctttccacgggggaaccgatataaaccgagagcccctccagcacgaggccgtagaatttctgttttgtcagacgaacgggaagctggccgataatctgacggatgcgcccgttcatgacggcggattccctggtattcgtaataaatgccatcagcatggccaggaaggactcatcgtcaaggcctgttttcggcagagaccggtaggatctctccatgcggtttaacacgtattcatagatctgaaagcagtccgtgtaagccgtcagaatctccacttcacgggtaacttcttcccggagctgatccagacgggaaaggatgtctccgccctccagaaacgctccgatgagttcgtgaagggtggcgagaaatgctcctccctttccggacagctccggttcttctgttatggtttcgtataacgtatagtaattaagcgccagcctcgtataagaatattgatacgccgctgtcatctgtttttttatgaaacgggtttccaatgtatttatcctcctgaagacttatccccgataatttgcgagtatggacctgcgcaggagatccagtgattttacgactgcctgttcccggatcttgtcccggttgcccttaaagtggtattcctccaccttcactttatccttcatatagcaggcaatgtagacgagtccgacaggcttgtccccttcggttgaaggtccggcaattccggtaacggcgatacagacgtcggcgtcagtggcaaatacgcctcccgtggccatctccttcgcagtctgttcgctgactgcgccgtacttcttaagcgttcccttgctgacatcgaggatttttctctttgccttattggagtaggtgacaaagccctcgcggaacacttcggaggctccggacacattcaccaggcgtccggcgatcagtccgccggtgcaggattcggcagtggtaaccgtgagctcatactttttaaggagacggacaaccgccatctccagggtctcctcttccttcgtcgtatagatatcgtcgccgaaccggttcttgatttcttttactaccggcttgatcagacttttggcggtctcgtcatcggcggcgcgcgccgtaacgcgtaaatgtacctctgccgtcttcgcgtaaggagcaatggtcggattcgtctgtgcggcgatcagatccttgatctggtcttccacctggctctccccatggccgcagatcttgatcatctgggaacggatcacctcaggctgtaatttctgaaggcagggggaaacctcatccagaaaaagaggctttaactcgttaaagggacccggaagaagaatcgccgtctttccatccttttccataatcagtccgggggctgtaccgttatgattgtcaagaaccttgcagccttccggaacaagagcctgtttccagttgttatccgtgatgaccggataaatgccatctttgaaatacgcctcgatccgctctctcgtatgcggatcttccaccagcttaaatcccataacgtcggcacagacttcctttgtgatgtcgtcctccgtagggcccaggccaccggtaaggatgatgatgtccgccctcttaagcgccgtactgatgtcctccgccagccgttcccggttgtctcccaccgtgacctgatggtacatggacagaccgagtgacgcgcatttctccgcgagaaactgggcgttggtattcacgatatttccgagtaaaagttctgttccgactgaaattaattcaacaaccataatgatttacagactcccttccgtaagaacacgataatttttcgcaatgtaatcgatcagtgaaaccaccgtcagcaccagcgcgatgacgctgaaaatggcggtcagtatggacagtgccgggatattgacaatcagcagcacagacataatcatctgagagacggtcttaaattttccccagtagctggcggcgatcacgacaccgttgtctgatgcgaccagacggaaaccgctgatgatgaactcacggctgataatgataatcacgaaccaggccggaagcgctccaaggccgacgaaacagattaagccggaacagaccagaagcttgtcagccagcgggtccatgaatttgccaaagttggttaccagattgtatttcctggcgatctttccatccagtaagtcggtaaagctggccacgatgaaaatgaccgcggcgatatagcggtacgtctggttcgcaccgccgtccagcagcataaagagtacaaaaaacggaatcatgatgattcgaagaatcgtcagtttattcggtaaattcatcttcaatctcccctattaaatcgtattccagcgcgcctgtgaccctggcccgcacaaaggcgccggacatcagttcctcgccggtctggataaaaatcatgccgtccacaccggggccgtccatgtaggtccttcccacataggcattttcatcggcaaccttgccttcgatcataacctccagcgatcttccgaccatggactgggaatggtcgaaggagatttcctgctgaagctccatgatggcatcacgccgcgcttccttcacttcctgtaaaacctgatccggaaatcctgccgccggagtgtcttcttccgcggaataggcaaacacaccgagacgttcgaattccatctcatccacaaattccatcagtatctcatgatcttcctctgtctcccccgggaatccggagatcagcgtcgtacggatggcgatatcaggaatctcactgcgtagtttgccgatcatctcctttaactgggcccgggatgtcctccgtcccatgcgtcgcaggatcgtgtcactggcgtgctggatcggcatgtcgatataatggcagatcttttcttcggtcttcatggtctggatcagttcatccgtgatctcttccggatagcagtactggatccggatccactgaatcccggaaatccggcagagcttctttaagagttcgggaagcgatttctttccatagagatccacaccgtaaagcgtcgtctcctgagctaccagaatcagctccttcaccccctgatcggccagtgactgtgcctccgacaccagacgttccatgggaacgctgcggaaattgccgcgcaggctggggatgatacagtaggtgcagtgcttgtcacagccttctgcaatcttcagaaacgcgtaatggcctcctgtggtaatcacccggtctgtcttcacttccgggatgatatccagatcgtggaagcactggacatgctctcggccgtccagtgtctcggccagcacgtgggatatctcatcataggtggtagtgccgagaattccgtccacttccggaatctcgtcgacgatctcctgtttatagcgctgtgcgaggcagcctgtgacaatcagcgccttacactttccgacctccttcatctgcgccatctcgagaatggtattcacactctcctccttggcgtcgccgataaaacaacatgtgttgatgacgatgacatccgcttcgtattcatcatccgtaaaggtatagccgtccctgtttaagaggcccagcatcatctccgtatccaccaggtttttatcgcagcccagcgaaatgcatagtaatttcataaaatgtcataactcctgtcttttcgtatcttctatttgcggaactatcaaaacggaaaggccatctctgtcaatgtggagacggccttcaaccttatcaatcgtcctcttcagttgcatccgcttcacttaagatctttacatcgccgtcatataactcttctacggcaacggaaagcggcttctttccagcggttggaagatcagactcagctcctccgatgatctgccttgccctctttgcggcagcgatcacgatagaataacggctctgaacaaccggctgttctcctggctctacctcactgtttactactttaattaaatctgaataagatggatgtaacatctttcattcccctttcctgatggctatatattctttaattcttccctgatctgggataaaaatgccagattatttgaaactctgctgtgctgtactctgatcatctgatgaagccgctccgtgcaggaggcgatatcgtcgttgattaagatataatcgtaggagtccatgccctccgcctcttccactgctctgcggagtcttgcatgaatcacatccatactttccgtgcctctgccgaccagccgtctcttcagttcctccgcactcggcggcatgacgaagatcagaatagcttccgggaaacgctccttaacctttaaggcgccctgaatctcaatctccagaagcacgtccttcccctgttccatctggtttaatacgtactccttcggagttccgtagtaatggttgacgtactgtgcgtattcgatcagcgcgtcctgtccgatcatctctttaaaacggtcttccgttacaaaaaagtattcccgtccatccgcttctccctctctgggactcctggtggtagcggatatggacagcgcataattgtcatacttttcaagcagggccttcataagggtgccttttcctgcgccggaaaagcccgatatgactgccagcacaccatgctcgttcataagtttccacctttgctttttattctatgttctgaatctgttctcttaccttctcgatctcggtcttcagcgcaatggccttgtctgaaatctccaaatcattggccttcgataaaatcgtgttggcctcccggttcatctcctgggcgataaaatccagctttcttcctacgcttccgccggcctccagctcaaccttcgtattctcaatgtggcttctcaaacgtacagtttcttcatccacacagatcttatcggcaaaaatagtcacttctgtggcgattcgtccttcatcgatggtggtatttgcaagaagttcttttaccttgtcttccagcttggcgcggtactcctcgataatccgcggggagcgctcctcgataaagtccacaagactggtcatgtagtttaacttgccctgtaaatcagcctttaaatgatctccctctgtaactcgtgtttccacaaacctgcgggctgcctcttcgaccgtctcggaaagaagcttccacatatgctcctcgtcttccggaacatcctccatggagagaacctccggacatctggaaagcgtggatactgtcacgtcatttcgtataccaaactgagtctccatcctggcaaagtaatccatgtattctgcggcaagcgcgctgttatacttcaagcacagcttgttctccgtgtaatcttcatacgtaataaacacgtcgacttttccgcgctggatataattcttcagcagattcctgattccggcttcaaaataattgaacttctttggcatcttgatgcttaaatccagatatctgtgatttaccgccttcatctcgacggaaatcttatattcatccgtgacggtttcgaatcttccaaaacctgtcatgctttttatcattccttgtgccttcctttcgccatagataccatccattataagtcataataaaaaacaagtcaaatagttttctggagggcaaaactggacgaaaggagtattccatagtataatatatccagtttcagtcagttgaacgataaaggagaacagctatgaagaaggaaagtatgatctggtacgatagaaagcgcctctggtgcggactcccatggacctttacgaaatatggaatggatgagggccgcctttttgtagaaaccggtttcttaaatacaaaggaagaagaggtacgcctctaccgcattttaaatatcagtctgagcaaaaatatcatccagaggatttttggactggggacgattcatattgacagtacggatctcgatttaaaatgcttgaaaattaccaatataaaggacagtgaccatgtaaaagagatgctgtctgaaaaagtggaggaagaacgcatgagaaaccgcgtcagcgccagggaattcatgaaccacggcgaagacggcgacgcagatgaggactttcacccgtttgacgatcatgaaaattagaaagacataaacattgaaaagaatagaggtacaacaatggcattagacggaattgtaatggccagtctcaaagcagaactgaaaactcgtctggagggcggaaagattgcgaagatcgcccagccggaaaaggatgaactgctgtttaccgttaagaatcagaaaaacacgtggcgcctgctcatatctgcgagcgccagtctgccgcttctctattttacggagcagaacaagcagagcccgttaacggctcccaatttctgtatgcttctgagaaaacacatcggaaacggccgcattatcagagtcagccagcctggactggaacgaatcatctgcctggaggtcgagcatctcgatgaactgggggataagcggataaagagactctatatcgagatcatgggcaagcacagcaacatcatcttctgcaatgaggaggatgtgattctcgacagcattaagcatatatccgcgcaggtcagctccgttcgcgaggttctgcccggccgtccctattttattcctcagacggtggagaaaaaggacccgctcaccatatcggagacggaatttatggaactgatcggccacacggctgcgccggttcagaaagcgctctatatgaagctgacaggcatcagccccatcatcggtacggagctttgccaccttgcctccatcgacggtgacgtttcagccaacgaactgtcggaggcggagctgatccatctctgccatatgttttcacttatgatggatgatgtgagaacgcatagcttcactccaaacattatctgtcaccagaatgagccggtggaattttccgctctcccgctcacctgttatgacggggacggttattcgaccgtgacctatgattccatcagcactttattagaggaatactatgcctcccggaatgttttgacgagaatccgtcagaagtctgtagacctgcggaaaatcgttcaaactgcgctggagagaaattataaaaagtatgatctgcagatgaagcagttaaaagatacggagaaaagggacaagtacaaggtctgcggcgaactgctcaacacgtacggctacgaactggaaggcggagaaaaaaagctgacctgcttaaactactacaccaatgaagaaatcacaattccgctggatgaccagctgaccgccagggaaaattctcaaaagttttttgataagtacaataagctgaaacgaacctatgaggccctctcgggacagacgcaggatacaaagcgggaaatcgatcatctggaatcggtcagcgccgcgctcgatattgcgctgaaggaggaagacctcgttcagatcaaggaagaactgatggaatacgactacatcaaacacaggcgcgccggtgataagaaaccgaagattacgagccggccgttccactatattacctccgacggattccacatctacgtcggcaagaacaactaccagaacgacgaacttaccttcaagctggcaaatggcggcgactggtggttccatgcaaagggtattcctggttcccacgtcattgtgaagacagaagggaaagaactgcccgaccatgtatttgaggaggccggttccctggctgcttactattccaagggccgggagaatgagaaggtggagatcgactacatccagagaaagcatatccggaaggtggccggcggcgccccgggatttgtcatttaccatacgaactactctctggtagctgagccgaagctgcttcttgaggaagtcagcgaaaaaaagaatcattaatcaggaaacgccacaggagggaagaaaatggcaatcgataaaaagtacgaagcggatgcggcagtaatcctctcccaccgttacgaccagggaggtctgctgtgggatacaccggaccaccggctacagaaaggggcgccgttttccacactggactgcgtaagctatctgatggaactggggatggaaccggaagaacccgtattaaaggaagctgcagagctgattttcagcgcatggcagaaggatggccgcatccggtgctatccgaagggaagtatctatccctgtcatacggcctgtgcggcacaggtgctgtgccgcctgggatatggagaggatgagcggcttaaggccacattccgctacttcctggacagccagtatcaggacggcggctggagatgccgaaagttttcctttggccatggcccggaaacagagtattccaatccgcatccaacacttcttgcactcaatgccttccgctttagtgattatatcaacagggaaccggcgctggaccgggcggtggagtttttactggatcactggacgatacggaagccgatcggtccgtgccattacgggatcggaacgctgtttatgcaggtggaatatccgttccggaactataatctttttgagtacgtctacgttctctccttctacgaacgggccagaaaggatgcccgtttcctggaagcatttcatgagctggaaaagaaaacggtggacgggcagattgtggtggaacgggtcgtgccgaagctggctaagctggccttctgtaaaaagggagagccaagcgaactggcgacgaggcgatttggggaaatacaagagaatctggcggcggatatctgacggactgtacggtaccactgcctgaaaaaagaatgccgcccttttggtaagctcttcagcaaaaccaaaagggcggtattttcatcctgcatttctgttactgtaccgtttcacatcggggtctgtcccagagaaatgggtcttctgttaattccagataatccttaagccgttcccgaaacgccaggatacgttcatctgtacagtctttctctatggcagccggattcatttcatacggatcaagccctctgtcatagagaagctctctctggggctcatcgggggcgtagccattggtgatgacataagtataccgcctgtttctgatcccccgccagccgtaggccttgtgtgtcaaaccgcgcttcgaaaatgcggcaaccatatccgcgcctcccggataggagcagatcagcatatcttccggttcaccgggcactgcgctgcctctgatcagactatcggcatggctgtatccctcacacgtctccggtacagccagatccagaagctctaagagcgtcggcatgtggtcaggacttgcgaagatcacatcatttttccccggcttcagtcttcccttctgccggaatatcagcgggatgtgaagcgcctcatcataccagatattcttgctcataagcccatgagaccccagcatttccccgtgatcggcggacagaaccacaagcgtgttctcctccatgccgttttccttcagccatgccaggattcttccaaactgctcgtcaattccatgtaccgcagcaaagtactggcgtgtctgtgtctctaagagaccgccctcttcccgcatggattccggcacattgggacggtagtgaaccttcagatttttaaatttctcataatagcgctccggtaccagctcatacggcaggtgcggcggattataggagacaaacagagcgaacggttcctctccgtccttcttctgattcatatattcaatggctttatcggtctcaaattccgcagaccatttgccgggttttatctgagtctcatcatccagccagtaatggggatcgagatgatcgtcacatgccccataggacaggaaataatcgaagccctgtcgtctctctcccggcggcgtataggcatcccactcgcctgcaccggactttggatgcggactaaaattgagttccgacgcgtcaaggtgccatttgccgatataacctgttgcgaaaccggcgtcctttaacacattggcgatacacgtctcctggggctttaacatgatcttctcctccaggccgatcttgcagttcgtccacatccccaggcggaacgggtatttgcccgtcatgagcgaggcccggtgcggggaacataagggaaaggtgctgtatgcgttggtacagcagacactttcctctgaaaaacggtcgatgttcggcgttacgacctgatcgcttccgagagagcctacggcctcggcgcgccactggtccgcgaagacatacagcagattggttttcatggatgtctcatctcctttaccagtataacttccaatcctgcgaaagccgggtaagggcttccatatagaaatagtctccccatgtattgcattcatctacaccgcggttcgtgcaggtattttccttcgaatcccttgcatacgtaccgtgaagcagcagtccgttggattttgtgatgtccgtgttggcgcagtgatccacgagagcccgcagcatgcggtccgcagccgttaagtagcggccggccttttcctgatctaaatatttggccatctccaggattccgcagacagcgatggccgatgcggaagaatctcttggttctgtgcttcccgtatcgaaatcgaaatcccagtagggaacgagatcttccggcagatgctcgataaagtaatccgtaacacggcagaataaatctacgtattccggattctttaaatagcggtagctgagagcgatgccgtagacgccccacgcctggcctctcgcccatgcggaaccgttccggttgccctgatgtgtgacgccgtatgtcggctcaccggtctccacatcaaagaaatgggtatggtacgtggaattgtcgggtcttaagatacatttcatagcggttttgatgtgattttccgctttctgcgcgtaggactcatctcctgttacctctgtcgcccagtaaaggatcggaaggttcaagaggcagtcgatgatcaggcggtactctttgggttcgcccggatttccccaagcctgaaggaagtttcctttttccctgtaacgctccgccagatggtcggcagctaaaagtgcagcttttttagcatgttcattaccggtcagcttataggctgccacacaggacaggctgtataagaagcccatatcgtggtgattgacatcgattttcttctcaatccgctctaaaaagctttctacctggatatcggcggcctgtttgaatgcctcatctccggtatgctcataggccagccagatggagccggtccagaagccggtggtccattccacattttccgtcggttcatagaaaccgtcaaagctgttggatgactggaatttttctgtaaatactggaagattttcccggataacagctacggcgccgtcaagcgccgtagttatcatcccctcttccatgcccggatagttccggatcgtgtcaagggtctgtgccatagttcattctccttattattaccgtgtccgaagtttttgttattttttatcccttaattccgcttgctgccacgccttccacgaagaacttctgacagcttaagaatacgatgacaaccgggatcagggaacagacggatgctgccatgatccatgcgtagtcggcgccatactgggaaataaacatacggatacctaactgaatcgtctttaattcctttgtctttaagtaaatgaggggtcccataaaatcgttccacacattggtgaaggtgaagatcgtcagggttgccatcgccggttttcccagcggaagcacgattcttgaaaagataccaaactcatttaagccatcgattctggccgcctcacagagctcatccgggatactgatatagaactgacggattaagaatacgccgaatgcagagaatgcctgcatcaggatcagtccgatatgagtatcatttaatcccatcttggaaatcagaatgaactgaggaatcatatatacctgccacggaaccgcaatggtggtaacgtacatcaggaaaatcaaatctcttcccttaaatttcgtctttgtaaagccgtaagccgcaagacagctggtgaacagctggatcaccgtggtgcagatcgtcagcttggccgtatttaagaagaacgtcatgaggggaagctttttccagatgatctggtagttatcccagtgcatggtatccggccaccatttcatgggaatggagaaaacgtccttgttaagctttaaggaggaaatcaccatccagtagaaaggaaccagcatgaataatgacagtaaaactaataaaatatagatgagacctttgtatgatttatgttttgtctgcataccgtttccctcctttacattaagtccttagaccattttttctcaccggtgaactgaatgagcgtgatgacaagtacaacggcgaacaggatgattgcgcctgcgcttgccggccccagctgccagctggtaaatgctttttcatagatatagttgaccagggtcttggtcgcattgccgggaccgccgccggtcataacgtatactaagtcgaataccttgaaacactggatcgtcagcatgattaagacgaagaatgtggtaggtgtcagcattggaatcgttatgtaacgaagcttctgccagccgttcgcaccatcgatgctggctgcttcatagagggaactcgagattccctgaagggctgccagataaacaatcatgtaatatcccatgtatttccagatactgacgatggaaatggccaccatggcccagttcacatccactacccagcggggcggtttggcgattcctataaattttaaaaattcattgaccggtccgaaatccggctgaaacagcatgttccagacagctcccaccgccacgatggaggcgatatacgggaaatagattgccgtacggaaaatggcgattcccttcagcttattgtttaaaagaacggctaaaagcagggaaagcaccagagtcggaaggaccgtcatgagtgcatactcaatggtgttccagaaggacttcataaagatctcatcctgaaagatctgagcgaaattggcaagccctacaaactccatgggagcctgggaggcatcccatttcataacacttaatacaaatgaaaaacatacgggaatgaagataaaaatcgcgtagccgatcagattcggcagtatgaatgcataaccgaccatattgtcgcggatcactctcttctgacgcgaggaaagacctttcttctttttttcttccatttattatacctcctggttctggcacacggtcaccgcttcccggcggcatgctgtgcgatatggtctgccctgcaggcaaaaagtacctgtcagagttgctttttcccataagaaagagcgctcaccataagaagtttacagaggcgctctttctgtcatgggaacctgttaatgattagttccagccctttatttctgctacacgtttgttcagttctgcaataccgtcgtcgatggagtaagccttgatcatgatcatctcatgtacttcgtctaatggcttacggatctcttcgatctgaggatcaagaggacggtcaaatgcgtaatgtgtataggttaaagcttccttgttgctgtcgccttccgggaaattctctgcggatgcgatggtgttgatggattcgtctgtctggatgcctgtgaatacgccctgctcagcaagaatgttggctgcttcttcagaggaggcaaattttacgaaatcccatgctaaatctttctgatcagtgtaagcgctgattccgattggtgttaaagcacctactgtgtaaccggattctgtatcttccggatgaggaattcttgctacgccccagttgaagtcggtttcgccttccgcctgagcctgcatcatggttgcgataaaccatgtacccatcggcatcatagcgcactgctgattcttaaatacagatgaatagtgaatgttggctgtctttaatgtggagtagtcctgcatataaccgttttcctgtaatgcaagtgcttcctcataatatggctttaagaaggagtaatctttctcaacaacggtgtgcttaccgtcctgaacagcccagttggtaacgagtgcctgccatgtgtggtcatgtgttccgtatactttggcgctgccctcaccggaggtcatctttgctgccagttcatcgtattcgccccatgtcatatcattggaaggatactctacgcctgctgcgtcaaataaatccttgttataatataatacgtaccagtcggaacggtatggaagtccgtaggttgtatcgttgtacattaactgctctgctgcaccactgtatacggataagtccaggttgtctgctttgatcatatcatctaacggaagcagctggcccttatctgccatctgaagcatggagcccatgtcctttacccagattacatcaggatcggcctgagcagcggataagctgattcccagtgagttgttgtactcgtctgcggaagtgtcgatgaccttgatctctacgttcggattctttgcttcatacgcttttactactgcggagaactgcggggttgtgtcataatcccatgtggttacggaaagaacctgcttctcaccgcttgctgctgtggtctcttccttgctctctgcatctgcagcggttgtggcctcttcctttgctgcggtctcaggtgccgctgttggtgtgttcttgcttccgcatgctgcgagtgatgtgcatgccattccggctgccagtgtcagtgctgcaactctctttaacttcatgttaaaacctcccttatttttgaatcacaattgtttgtgttccttgatgacataagaataccaaatatttcactcaggttaaatcaacgatttttataattctgttactatttttctgatttgataaaataacagtcggaaaaaatatactatttacagattcttgtatttttttcatgtcgtgctgcttcggcaattgaaatcctgcggttttattagtatgatatcattgaaaacatatggaaagggttgaaatatgaagagagcagaaaaacagaaaaacggaaaaatgccgaaaacctttcagaagaaactgatcttatataatatgctggtcattatctgtatagccagcgcagtaagcttctataactatcgttcctactgtcaggatgtcatcatcagtgagaccaataactccgcaaaccgcgtccgggcgctgtcggagcggctccaggtggcatacgatgaaatggtgaatatcgtgctgaactgcgcggaacggaaatcgctgttcttcgccaccactctggacagccccaacaagccctataatacccacatggcggtctatgcctccgatgtactgcgggatttctgcgccatctccggttacagcaggtatatcaataaaatcgtgctctttcataatggtctcgttcttcaggcagggaactcctttggcgcgtccacggatgtggaaaacattatgaaagccccctggttttcttctctgttatacagggaaaactcacagtataccctttccctggaagataatccgtttacattcagcagcggccgttcggccgggccaaagcttcttccgctcctccggccgctccaatacagcgcccggtcgaagcctgaggaatcctgggtcttcctggggatctctacgaccctgttttcggatacactgaaaagtctgccgccggatgcgcttgtgtatgccgtgactgcaggcggggatatcattgcttcgaccgatgtgaacggcgaatttgacacttccgccataatcggcagtcttctggctgacaaaggggcagaaggcaattatcagatgaagctgaaccacgaaaactgtgtaatcacctatgtaaaacagccggtcagcggtcttctcttctttgagatccgcccggagagccggatgcagctggatcacggcgttatccggagaacggttctgatcgtatttttcttctgcatcgcgatcgggctcactctctcgctcttaatctcgcgccagctgggcgctcccatcagccgtctgacgaagcgtctggagctgatttccaggggggatttcgaaccggatcactccattgagacagatgatgagatcggtatgatcggacggcagatcaatcatatgtcggggcacatttccacccttctggagacgagagtggaaaatgaaaaagaaaaaaaggatatggaaatcaagatgcttcaggcccagatcaacccccatttcctctataacacgctggattccatcaaatggattgcaactatgcagaaaaacagcggaatcgtgtcggtggttaccgctctctcctccttattaaagaatatggctaagggcttcaatgagaaagtaacgctgcgccaggagttggattttctccaaaattatgttattattgaaaaaatccggtatattgaactgtttgacatcgacattattgtcgaacaggaggaactttacgatgcaaggatcattaaactgacgctgcagccaatcgtggaaaacgccatcttcagcggcatcgagcccagcggacggacggggctcatcaccatccgcgtctgggttaagtccggcgtcctgcatatatccgtcacggataacggcatcggtatttcgcctgaaaatattaaaaaactgctgaccgatacttccagaattacccgcagcaacatgagcggcatcggccttcccaatgtagaccgcagattcaagctggtatacggcgaggattacggcctgacgattgaaagtgttgttgatcaatataccactattaccataacgctgccgctggaattttaaaggccggccgtggggaggaaaaaaattatgtacagagttattatcgtggacgatgaaccgcttatcctggccggtatcgcatctcttatcacctgggaggagtatgactgcaccatcatcggcaaagcgaccaacggtccgtccgcttttgatatgatcatggagctgaaaccggacatcgtcatcaccgatatccggatgccggtgttaaacggactggagctggtggagaaatgcaaggacgagggctgtaccttctccttcatcgtactgaccaacttagaagagtttcaccttgtgagaaaagcgctctccctgggggcttccgactaccttgtcaagctggatttaaacgaggaagcgctggctgcctcccttgcgcgggccaaggaggcgtgtgagctgcttgtgagccagaaacagcaccagctgttaaatgacctgatgaaggacaatcaggagaatgcatccaaaaactatttgagccagcttctgctgtccgggaataacccggaggtgccggataaggtaagggcggaatatccggatccatttttgcttctcttctccataagccccatcaatattgcgtttgagactgatgacgatccctacgatttccatcagatcagcaaacagctgatggacatactgggcggaatcgccaccagaacctttcgctgccatacacttctcgagttccggacggatacgtatctgctggccgcttccctaaaggatggcgatgtatttgagacggtggtgtcggagttctgtcagaagatgacggtggctttaaaaacgtatttcgagttcagcgccgtattcggcgtgagcaggcggaaatcggatatctcgcttcttagggatgcgctgtcagaggcgcagactgcgctggaggtctactatttcgaatccagctcaccggtggttttctaccaagggcagaaatatcatatgagcagggcgaaggattttaatatcaatattttcaaaaaagatttatctgcagcgatcgcacagaatgacagcgataagcttgcggctgtcttcgggcagattatcactctctttaaggaaaaccagccgggcaaggagcaggcggccagcgcgtgtatcaatctctatacatatctgtattcatattttgagagcgcggataacagctacggggatatcttcccctatgcgatcaatgtggcgggacggctctatcagtttaacagcctggccgatattctgacctggctccagagcttctgcagcaagctctgccggctgctgaacgaccggaagtccacccgttccgataagctggtggagcaggccagagcctatgtagacgagcattacatggaaaagctgaccctggctgatatcgctgactgtttgaacatcagcgccggccatttgagcaacacctttaagaagcttaccggcagcacactgtccgattatattgccacagtaaaaatcgaacacgccaaggaactgattgatacacaccagtatctgatgtatgagatctcggatatgctgggctttgataatccctactatttcagcaaggtatttaaaaaggtaacgggaatctctcccagagaacatgaaaacaggacacctgcctcgtaatacggcaggcgtcctgttttcttatggaagtgctgttagaaatccttatcgtctttggcacccggtatcaggtacagaaattcctttttcccctcacggtatgcccgtttggccagtgcttcgcactgataagaatctaacgattctacggcgatactgaaaaaatccttccggtcgtcttcataggcacgatatgcgtatgatgtctgttcgttcccggcaagatctgaaaacaggatggagaagaatgcggtctgattatcctgataggatttttccagatactgaagcctctcttctgccgtcaggatctgcaccgtcatgctgaagcagggaatgttatgttccttataggcacgttctgccatagcagcctgcgtctcctttgaggacttttccagcacggaagaatagtattcttttttcccggactcatagaatacagcggcaagctcatcatatgtctcctgataagggccatccactcccaccacgacaggatttgtcataataaaattggtgacccactgattggtggaattctcttctgtctcccgttcctccagtatggccagacgaatggcttccatgacatctggattatctgcatactgtttcagttcttcgatgaaggatacggtatatacctcccctgctgtgacctgccgggtcgtctgatagagggatgaatcattattccatgcaaggcggattccgtattgatttacgaaaaagccttcggttttaaagctgtgcctccattttttactttcgggattcttcgaatcgttgagccatccatctgttatatctgagtctgtctgtatctgccgctccggctcctgtgcatctgaagcaaagcctccaagtatgagaagtgagccggttaaaaccgcggttaccgccaatgatgccaacttttgaattcttgtgatcttcgttgctttcataatagttcttaaagactgcagtatccaacgatctcacagtcagccggcagttcatatccgctcagactgcccagtgtccactttgtctggaacggacggcgttcatcgagagccgctgcgaaattcagcatgacagccccgcagtttaatctggcatcgagttcgccggtcatggagtccatcatcttcaccaggattgcttttccgtcagccaggagcaggcggaaggactggcggtttaagaaggttggcgcatagcttgccgcatacagggcatctctgaggccgtcgtcgatatacatctcatccaaatcggcttctttgccccatgcatcgccataaaccatctgtgcgagtgaaatcttcggtgccaggtggccctctctcgtgatgacatccacatcagaaatacttctgatatggagcctcgtcaggcttctctccttttttccatagccaaaggcagtgatggcagcaacttttctgtcatccccgatctttagcgcagcccggagcgccggatcgtcatcgacggtcagccagcagctgtctagtcccatgtcggtcatgtgaaggatgatgtcctcgttcatgtagcccacattttcaagatagcccggcttcacttctgaaaggagaagcagataggcgggcgcctcaaacgtaaggccttcgtaacctgcattgccctggagacagccgcattctgattgatcaagtattagtatctctgttttgatatctggtacaagacgcctgcattctgcgaagctttttttgagcgcttctttcagttctccggatacgggtttgtctgtaaattctctgattgattttctggcttccgccacttttctgtaatccatgattgccctccttgttttatgattccttttatattataacaccgctcttcacggcgggcaagacttcctcgggtctttgacaccctgaccataaagatcagcgtgtaaaccagcaatgtcttagttaaaaggactgtcaaagacgggattatgtcatcgttgagcagcgtctgcaggcaaaaccggcttttgagcttcggatacccttgccggaaacgtcagggtgaataccgttccttggcccggcctgctttccacctccacggtccctcccatagcttctgcggtatttttcacgatatataatcccagcccgctggacccatccttctctccccgttccggtgacaccttatagaatcgctggaagatgtgaggaagatgctccgcgccaatcccttccccggtatcggccaccacaagattggcccgctcaccggcttcacacagtttcaaggagatgctcccgcctttcggcgtgtggcgcagcgcattgtagactaagttgtccagcacactccagattttgtgccggtcgatcaaaagctctgcggcgcagtccgccccaaccgaaaaggaaagctctttatcacggattaaatcgccatatttacttcccgcttcttctaaaagactggacccttccacccactccagacggtaaaccgcagttcccgcctccatacgggtgacctcaaacaggttatgaacgagacgctgaaggtctaggttcttatggtaggcaatccctatgtactccgctctctccttctcgttggaggcgatggcatcatcccccaacagttccaaatagttgttaagcaccgtcagcggggtctttaaatcatgggaaatgttactgatcatctcccgcagtgcggcctgggaggcggacagctgcctgttggtgtcgttcagctgtgcggtccgttcctccacaatccgttccagattttcattgacccgttccacttgttcatgagcgtcggcataactgcgggaaagcatcacgcactggctgaggatgaggaataagttggatacggcgccaggtatatacagctttgcctccagcaccgtcttggtcagcggcgcatagatgatgaagagaaccaggctgaatagatacaagagccggtaagggtccctgccaactttgccgcttcgaagggcaagcgccgcagccaggccgttggggatcagcgcaaggaacagaccggccaccgccgccgtattcggcaacagaaacactcccaacaccggcagcgcaaagcaggccatcaccactctgcgatgaagacggcttaagcggagggaaaacgcctccagcataaaaaggcagatgcagatggaatggagcgcaaacagcagcagataaacccggctcaggaaaaaagtcagcccatcccggcagaaatattgtaccattgagttcgtctccatcaccagccgcagcactgtcacaacacaggttacgctgtacaccagatacaagcgttccatgcggcggaacagatataaaaacaggtggtacacaccgatcagcaatatgcctcccatagcggcggcggccgctgcccgctgccagagtaaatgatggagcatgacggtatcgcggccaaacaggattggataaaacaggccactgtcggtcagatgataattggcagcccaaaccaccagttccaaagtcccgtcttctgatgacaccgccagcagttcattgcgcacaccggtcactgtattggcagcggaatctcccacctgaccggcccggtaaatctccgtaccgttgttccagatcaccgcagatgaaatgatctccggaataaagagcagatagatttccccaggatccgtctgaagggtcagccggtaggtggcatggccgagaaccggatatcccaggccggcccaggaaccgggcagcgtgatcaattcccggccttttggcgttccctgcttaaactcttccggcgcataaaggctgccgtaataaaattcccattggccatccagctgataaaccgaggaggtaaagtcagttcctctataatccagaaccccatccaccgcctccggcccctttgatacaaaagacacggacatggtaacaaacagcgcggcgcacaaagccagaatcaataaaaagattgccaaaaagcgtttcatatctttatcctcgcttccgaaccaggtatgaagcggtagccttccccccgaaccgtctcgatccggccaatcacggccccagcatcctccagcttatgccgcagccgcttgatatgtactgccacagtgtttgcactgtctgtttccccagtgcgccagacctgctgatacagttctgccgccggaaaaatctggccgggattgccaaacagaaacaaaaacagttcaaactccttctggggcagtgggatgatctggtcatcgaccagcaaaagctggttcgagtggtcgatggcaaatctcttcatggagacgctccgcacctgggcgtatacccgcgccgccagctcctttaagctgtatggtttggtgatatagtcatcacccccagccatcagaccctcgatcttgtcctcctcctcatccatacagctaagaaacaggatgggcgcagaggtaagggcccgaatcgcctcacaaagcgcaaatccgttcctatcgggcagcagtacatccaataagatcgcgtcataattctgatttttcagatgttccagcgcttctgacgcgcaggctgccgtgtcaacctggtatccctgcgcttctaagtacctgcggttcgtccggagtatatcaggctcgtcatcaactgccaaaatccggtaagcataatccatagattcacctccaatccgtaacatgaacgattctgttcatattccataaacggacaaatgcgaatggcagctgccattcgcattgtatcactgtcactattgtatgatagaacagactgcttgtcaatgcagggaatgcaagaaaagtctcgcaagaaatgcccggaggtctctaagcagtgctcagtaacctcctcatcgatagctgggaaaataacggcgctctgtcattttctgtgttttttccccgaagagcccctgcgtctggcaagcagcgcctcgaattcttccgccgaacagccggattcctgcatccactgctctcttcggtgctttctcacagccgccgctttcgcttcccttattttctgtctcttcaggataaacagaatgccgcctgcgatgacggccagtacagcggcggctccggcagccagaaaccagcggcgggagaacttcatcgcaggacgattgccgggatcggacccatctgatataccatccgggacggcagaccgggtgaggcggctttggatggctggattgggggtaatccaggcgtggccgactgtacgctctccgtacaggtaattaaccgtcacgacggttccggagggagtaagagaagtctcgtcgtagctcacgattgggacgacggcagacagatcagcctccttcggaagcacgatgcggctgttttggttcagcagaagaagcgactggtccgtccgggagtctgagtaggtcagatggttttccgggacgagactgccttcatagtcggcaagcttcttagactcgaactggctgaagccgaagtccagcagtttttttgtatcggtataatgcgtctggtgaccatttaaaataaccgaaatcagcgtcatatcgtcttttttcgcataagtcaccagggtattgccggccagcgacgtaaatccggtttttccgccaaagactctgggatcataggcggaatcattctttttgagcatcttgtgccccggtgatatggtctgtccctcgggcgcttttttagatggcgggatcttatagactctcgtccccatgatttcgacaatctcaggataatttaacgccgacctggcaattaaggccatatcgtaggcggtagtataatgatccggattgtttaaaccgctgggattgacgaaattcgatccggtacagcccagctccttcgcctttttattcatcagcttcgcaaattcttccgtgctcccggctgcatgttcagccagagcattggccacctcgttggccgaatgcaggatcagaccgtataagcagtcctttaccgacatccggtctcccgtatccatgctcaggctcttactcccctgctccacgttgtagacagcattctgagagaattccaccacttcatccagcctgcaccggtccagtaccacctgggccgtcagcagcttcgtgatactggccggataatacgcctcgttgatattctttccataaaggattgtccccgtatccgcatccatcaggattccgccatccgcttccatggcgacttcggacggccagtcagccgccccgtatactgtcatgggcgtaaggcccgtaaatgccactgccatacagagtaaaaaataaaacaaaatgttctttttatgccgcataatcatgtctcctgaacataaacatattccttttcacaggaatattcttcccggtaacggtatcccaacgcagtaaactcctttaatttcccaacacattctatgccgttggcagccataaaacgcaccatctcacctctcgccatctttgcggcggtcgccttaacccgtacctttcctccctgctctgtgccgaatacacaggtgatgaaggtgtcagaagccttcagccatggttccaccgcccggctgtactctttcgatgcaagattaataatcacggaatctccatctgcggtcagttcctcatagatgcggcttccccagaaaccatacagatccctgttcccatcgacgggaagcctggcctgcatctccagcctgtatggaacgacgccgtcgcatgcctttaaaacaccgtaaaatccgctcagtatccgcagatgatcttttacatagtcccattgggagccggtaaaaatatcgggagccatggactggtactgaaggccgacataagccaggacagccggtgtcaggcccctctctaaatccatggtctgataacgctcgtaattctgtcttgtgatcgcttcattggcgccgaacagctttcccagctgttccatggaatactcctttaacaggccatgaagctgttttgcatcttccagaaagaccggcatgcccgtctcttccatgatgtcagtctgtactctcatcttcttggccggggatatgataattttcatttgttttctcctcgctgtctcgtatccttgtaagtctcatcctgcattaaatcacaggtaacggcagaaaaaatccgtattccctcttccagtaccgtttcgtcaaaatcgaaatccgctgtgtgctggggagcttccatgcgggtcatgttccgcatgcagatagcctggccaccgtgggactggacccggttcatcatcagggaaatatcttcgcttccccagttcctgacgtttctcacactgctgacccggatatccggaagttcccgctcgataagcgcagcggctctgtcagccagtgccagatcgctgtggtgggaatcggcagctcccatgcagatcatctcgcaggtacagccatacatggctgcagcggcctcacagatgcgtctggcgctgtcttccatatatgcgttgactgctgtcgtttctcctctcagctctatctccatcttcgcgtaatcggggattacattccttccggtacctgcgtgaagcgtcccagtattgacccggctggccccttcgctgtgacgaggaatggccgccaggcccatcgctgcggaggctgcagccatgagggcgtttcgtcccttttcagggaatccgccggcatgagccggagcgccatggtagatcacgtcgtatttggtcgtggccagagaaccataggtcgccggagtcaccgctccgtcatcggggccgtctaaaggcgcgagatgggttccgataaagtaatccacatcgtccaaatgccccttggaaacgatggctctcgccccacgcacgccttcctcggcgggctgaaagatcagcttcacagttccgtgcagctgttcttttacgctcataaggacctccgccacaccgaggccgatggcggtatggccgtcatggccgcaggcgtgcataacgcccggacacagggaagcaaagccctcgcgggccggtctgtggccggagctctcatcctccagcacaccgagggcgtcgatatcaaaccgaagggcgcagacgggacccgggccgcatctcaggattccgattaccccggtatatcccgcctccatctcttctgtcaggtatgtaaggggcgtattccagttttttcttatcaggtttacgtgttcccggagcgccgcctccgaagggaggcccagtctggcttctccatccaacacgttactgccggtcagtacctcataccccagctccgtcagaatcccggcgatgacggcggaagtgcgcatctccagccagcccgtctccggatgccggtgcaagtctcttctcctcgccacgcttctttcaaaaatctcttttgccatggctgtaatctgatcgtacatctatcttcatctctcttctcctgtatttcctgtactaacagttctctaaaattttaacataggaaacagggaaaagcaattgaaggaacttccagttccgcgtataataatcttacgtttttataacgaaaaaatcagaaaaccggaggcaattatgaaaaaaattctggtcatcggctccacatgcgtggatatcatcctgaagctggatcatctccccgtaacgggagaagaccttcatccgaaaagtcagtccatggcgcttgggggctgtgcctgcaatgcagcgcatgttctgctatactccggctcggagtttaccttcctttccccggtgggcggcggaatatacggcgattttgtaaaggaagctctgactgcccacggtttttctataccggtttatctcccggaaaaagaaaacggctgctgttactgccttgtggaagcctccggagagcggacgtttctctctctgcacggcgtcgaatacacctttcggaaagaatggatggaaccataccgcatggaagactattccatggcctatctctgcggactggaggtggaagaaccaacgggggaagctctggtggagtattttgaagaagagcgtggaccgaagctgttttttgcacccggtccacgcggaaccagacttccaggagagcggctgaaccgaatcctcgcactctcccccgtacttcatatcaatgagcaggaagcgctggagctgggcggcagggactgcgtggcagatgccgcggcagccctttatcagataacgggaagtccggtcattgtaacactgggagaacgcggcgcatactgccgcgaaagcgaggaacacgcctatgtgatcccgggaatcccgtcaagggttgtggacaccataggagcaggcgactcccatatcggggccattctcgccggccttcagaaaggcagcagcctgcgagatgccatcgcggctgccaatcaggtggcggccgccgtggtcagccaggagggggcgatccttccgaaggattccgttttgttcaggaatctgcgtttgacgaaagagggattgagagagaatacgaatcattaatcgagtaggagggagtgattaactcccgtcctctcacaccaccgtgcataccgttcggtacacggcggtttcaacagttgacgtgcacggactgataggctgtggctaaatcataatagccactgtttatcagtctttcttttgtcattgccatatttaccgctaccgtttgtgtggtaaaccaatagcctcttcggctgttccctgccttccatgccaattctttcggcactcccattttcagcaggttcttcaccttcgttttcggtttcttccattgtttccatatacacattcggattctgtgatatagccattggttcagtccctctattcggttcttcatatctgctactccataataattcagccagccccgcatatacacctttatcttttctaacgatgggcgtatgctctgaacagaccttcgggaactaaggtctttcagttttgacttcattttcttccatgacttcccatgaacccggacataaatgccctttccgttctttcccaatgtgaagccaaggaacttaaaatttcggattgcaaatacacttactacacggcttttcttctggttcacctgcaatttcagcgtcccttccagatatttcgtgcttgtttccagaagtctctttgcggctctctcacttttagctaacaatactatatcatctgcgtaacgtacaaaagccactcctcgtttctcgtactcctggtcgaactcgttcagatagacatttgccagcagcggggatagatttcctccttgcggcgatccttcctctgtctccatgactacaccgttttccatgacaccactctttaggtatctctttatccattggataaccctttcatcctttacatctctgcgcaggatatttaatagcatttcttggttcagagtatcaaagtatttcgacaggtccaatgcaacggcatgggtgtatccctgttctgcatactcttttacctttaaaatggcgtccctggcgcttcttcccggccgatacccatagctgttctccgagaacagcgcctcatagactggcattaactgctgtcctatggcttgctggaagatacggtctttcacggttggaatgcccaactttcgcactcctctctctggcttgggaatctctactcgtcttactgggtcgggggtgtattttccccttttgattctctctatcagttccttttgattttccctcaggtagtcacctgtttcctctacggtcattccgtcgattcccggcgctcccttattcgcctttactctcttaaaagctctgtttaagttgtccttattcagtatcttctctaagagttccggctgtgcactgtctctttccttccatatccggcggaaagaacggtgcgctctcacatacccttcacgttccgcgctgtctctttgtgagcagctatctttgttttctgtacccaatgttctttcctcctttcccggttgtactaaagactcctgttgattcggtccttcatctctcgactactacgacctcggctgacttctgtacgttcagcactatctcacgatagtggttatccctttcaggacattccgcacagacctccccgggtaccacacgtttctttctctccatctatctgccacatttaccatacatgattctgtgtagttattgggctttgacttgttgtgcagtcttaccctcatgtatagcctgatgtgatttctgttcgtcagaccagagatttgcccatgggttagtatgttccccatatccagcttccttcagattccacctcacgatggacacccttgccttcggctatatccttcccaccaccgggcggattccggacttgcaccggttagaaacgtgcgccgccgggcgcaatcgagtaggagggagtgattaactcccgtcctctcacaccaccgtgcataccgttcggtacacggcggtttcaacggttgacgtgcacggactgataggctgtggctaaatcataatagcctctgtttatcagtctttcttttgtcattgccatatttaccgctaccgtttgtgtggtaaaccaatagcctcttcggctgttccctgccttccatgccaattctttcggcacccccattttcagcaggttctttaccttcgttttcggtttcttccattgtttccatatacacattcggattctgtgatatagccattggttcagtccctctattcggttcttcatatctgctactccataataattcagccagccccgcatatacacctttatcttttctaacgatgggcgtatgctctgaacagaccttcgggaactaaggtctttcagttttgacttcattttcttccatgacttcccatgaacccggacataaatgccctttccgttctttcccaatgtgaagccaaggaacttaaaatttcggattgcaaatacacttactacacggcttttcttctggttcacctgcaatttcagcgtcccttccagatatttcgtgcttgtttccagaagtctctttgcggctctctcacttttagctaacaatactatatcatctgcgtaacgtacaaaagccactccccgtttctcgtactcctggtcgaactcgttcagatagacatttgccagcagcggggatagatttcctccttgcggcgatccttcctctgtctccatgactacaccgttttccatgacaccactctttaggtatctctttatccattggataaccctttcatcctttacatctctgcgcaggatatttaatagcatttcttggttcagagtatcaaagtatttcgacaagtccaatgcaacggcatgggtgtatccctgttctgcatactcttttacctttaaaatggcgtccctggcgcttcttcccggccgatacccatagctgttctccgagaacagcgcctcatagactggcattaactgctgtcctatggcttgctggaagatacggtctttcacggttggaatgcccagctttcgcattcctccctctggcttgggaatctctactcgtcttactgggtcgggggtgtattttccccttttgattctctctatcagttccttttgattttcccttaggcagtcacctgtttcctctacggtcattccgtcgattcccggcgctcccttattcgcctttactctcttaaaagctctgtttaagttgtccttattcagtatcttctctaagagttccggctgtgcactgtctctttccttccatatccggcggaaagaacggtgcgctctcacatacccttcacgttccgcgctgtctctttgtgagcagctatctctgttttctgtacccaatgttctttcctcctttcccggttgtactaaagactcctgttgattcggtccttcgtctctcgactactatgacctctgctgacttctgtacgttcagcactacctcacgatagtggttatccctttcaggacattccgcacagacctccccgggtaccacacgtttctttctctccatctatctgccacatttaccatacatgattccgtgtggttattgggcttcgacttgtttggcagccttaccctcacgcatggcctgatgtgatttctgttcgtcagaccagagatttgcccatgggttagtatgttccccatatccagcttccttcagattccacctcacgatggacacccttgccttcggctatatccttcccaccaccgggcggattccggacttgcaccggttagaaacgtgcgccgccgggcgcaccacaaaagcagaagaaccgcggtaccctgccggtcaccgcggttcttctgctttatatggtgattctaaatagtttgatatcttaatccgcgtaagttcctttggacttcaccagcttcggacggtatcctgcttcggtgagcgcagccataatggtgtttttgtgttctgtgccgtaagcttctatggtgatgcgcagctccactgcagagttccggttgatgctgatgaactgattgtgttccaggcggattacgttgccctgctctttcgcaagaagcgtggaaaccttggccagttcacccggcttatccggaagcaggacggacacggtaaatacccggtctctctggatcagaccgtgctgtacgatggaagccatggtaatgacatccatgttgccgccgcttaagatggaaacgatcttcttgttttctgccttcatatgctttaaggcggctacagtcagaagaccggagttctccacgatcatcttatgattctccaccatgtcgaggaaggaaacgatcagctctgaatcttcgatggtgatgatgtcatccacattttcctgaatataaggaaacagcttatcgcccgggcactgaaccgccgtaccgtctgcaatcgtgttgacgccgtttaaggcgacgaccttgccctggcgcagtgattcctgcatgcagttggcgccggccggctctacgccgatgactttgatcttcggattcagcatcttcgccagtgtggcaacaccggtacagagtccgccgccgccgatgggaacgagtatgtaatccacggtcggcagttccttgatgatctccatggctatggttccctggccggtagccacatccagatcgttaaacggatggataaaggtaaggcctttttcctctgccagcttataggcgtagctgcaggcttcatcgaagacgtcgccttccagaacgacctccgcgccgtaccccttggtccggtttaccttcatgagcggcgttgtcgtcggcataacgatggttgcggagattccagccagcttcgcggcgtaggccacaccctgagcgtgattgcctgcagaagcggtgattaagcccttcgccttttcttcctcgcttaaggtgctgatcttataataagcaccacgcaccttataagcccctgtatactgcatattttccggtttgaaccagacacggttgcctgtctgggaagaaaaatactcgctgtacaccagctttgtctcctgggttactttgctcacaacctcggttgcctcttcaaatttctctaatgtcaacataccttacgcctcttctttctcttccacatggaataatgcatttacaaactcttccgcgttaaatttctgcagatcgtcgatcttctctccaacccccacgtatttgaccggaatccccagttccgactggattgccacggcgattccgcctttggcggttccatccagcttcgttaagatgattcccgtaatatccgccacttccataaactgtctggcctgtgaaagtgcattctgtccggtcgtaccgtccagcactaccagcgtctcccggtaggcctccggaaactccttgtcgatgatccggttaatcttcttaagctcttccatcagattctttttattgtgaagccgtcccgccgtatcgcagatcagaatatccgcgcggcgtgatttggcagcggctacggcgtcgtagacgactgcggccggatcggagccttcctgctgtgcaatgatatccacgccggcccggttggcccattccgtcagctgctcgatcgcggcggcgcggaaggtatctgccgctgcgagaattacctttttcccgtcatcctttaactggccagccagcttgccgacggaagtggtctttcccactccgttgactccgatgatcagaagaacagactggcggttctcgtattcatacgcgttttctcccagatccatctgatcccgaatgctttccatcagaagctctttgcattccgacgggtctttaattccctgttcctttaccttttttcttaaatcctccacaatcgacatggtggtctgaattcccaagtctcccatgatcagagtctcttcgatctcctcataaaactcatcatcgatggctgaaaagccgctgaaaatggaatccattcccgatataatattgtcccttgtcttttgcagtcctgctaccagtttcccaaagaatccctttttctcactcatagacggcctcctttacttatctaaatcttcttctatcagatttaccgaaacaagcgttgaaacgcctttctcctgcatggtaataccgtataaacggtctgcggccaccatcgttccgtgacggtgggtgatgacgataaactgtgtatacttcgtcagtttatgtaaatattttgcatatctgtccacattcgaatcgtctaacgctgcctcgatctcatccagcagacagaagggagacggttttaagttctgaatcgcgaacagcagcgcaatggcagtcagggccttctctccaccggagagctgcatcatattctgcagttttttgcccggcggctgggagataatctgaattcccgcttccaggatatcctcatcctccaccagttccagagtaccgcggcctccgccgaacagctccttaaatactttgtcgaattcggtacggatctccttgaatttctcctcaaactgccttctcataccggtatccagttcatcgatgatcttaagcagcgtctcctccgccgtaaccagatcgtcgtgctgggtcttcatgaatacgtaccgttccgatacttctttataatcctcaatggcgttgacattgacattgccgagcttcttgatctcttcttttaaggaagcgatgtgctttcggatctccggaagggattcctcctccccgcccttaagttccagtgcggcggaataggtcagctcgtactcatcccacatgtagtttgccgaattttccaggcgttcctccagcttctccttctgactctgcagacggaataaatccttgtcgagacggctcatccggtcggaaagttcttcccgcttctgaaagagttccttctgctgtcttgacttttcttctctctctgccgtcttttccgcgattacagactcgaggcctgcagcgcgtatcacggtattctcaatctgcgcctttaatccggcgatttccgccagcttttcttcgataatcaggttggaatcatcggtgccgccggaaaggccggaaagctcctcctccagacggcggacgtcttccttgacccgccggatattctccagttcgaaatcgtccttctgtttgagaccggacgcctctaactggacggtggaaagtgctctggaagcctcctcccgttctgccttcgccgcgtcaagacgctcgtggcaggaatccaggcggctgttgatatcctggttctgctcctccagccggataacttcgtcggccagctcgctgcggctcctgccgatctcccggatctgctcctccagctggctgttttcgcgttccagatcgccataggattcccggatctcttcctttttatcctcagtcctggaaatgctcatgcggaccgtattctggcgcagatagctctcctgttttctggattttaacgattccagttcttcccggctctcggccagaagcgcctcgttcatcaccagatcctgttcaatccggtccacatcggtcagcgccttggtacaggccccttccagttcctcgatctcccgctttctgcccagtaaattgctggtgttcttaaatgcgccgccggtcatggaaccgcccgcgctcagcagctcgccctccagggtgacgatccgcagggaatactggaattttctggccagtgcaatggcgttgtcgatggtatccaccactacgacccgccccagcagataccggatcagcccttcatactggccgtctgtctccaccagactgttggccagtcctaagacaccgggctccttcagcgccttgtcctgattaaaggtgttcttgttgccgatactggtaagcggtaagaaggtcgcccttccgtaccggtttttcttcagatattcgatcagctgcttcgccgtctgttcggaatccgtcacaatgttctggatgcttccgcccagcgccgtctccaccgcgatctcatacttcttcggaacggtgattaaatcggccacaacgccgtggatgccgtgaatacggtctctgacctccatgacgcggcggatgcttccgccgtagccctcataccgttccgctatattcttcagcgattccagcttcgtatagctggtgtggtattcctgctgcttatcgtttaaattcctgttcaggcggcggacctcgtgatccagctcctccgtcctcgtctcggccgctgcctgggcgtctccgagactggcgatttcggcctcaatctcttccagctgacggtttaactcgtctaaccggccatcctgctccgattcgtcgctcttatactttaaaagcttctgacatacctcggaacgccggacatttacctgttccagcatggtttcgtaccgctgctgtctggcgtttatggaggccttctcgtttaaggtgtcgatgatgtttcccttgccggattcaatctcttcctccagcgcccggatctcctcgtccttcttcttcagggcctcctcagcagcggccaggcgttctaaggattccttaacctgggcggcaataccgcttcgttcttcctcgtaggcggagaccttcgtcttcttatccgcgatttccccgtggatcgctgtcattcgctttccaatgtgctccgcgttcatcttttccgtgttgatctgctcgttcagcacacccacacggccttcgagggtacccttttccatgttggcctcactgagcgccgttctggcctcacctgcggctgcctccagcccggataaaagggcgtcgagggtctcatattccacacggatatgttcggaagcctgtctcgtttcttccagatccttcgatacgatggctgcgttttcttccgtctcttttaactggttgcgcgttccggcggtttccagcaggaactggttcacatcgtatttttttaaatcttcttttaaacgcagatactccttcgcggcctcggactgctttgccagaggaccgacctgcttctccagttccgataaaatatcagtcacacggaccagattctgtttctcatcctccagtttcttctgcgcgatggcttttcttcgcttaaacttaacgattccggccgcctcatcaaagagctcccgcctctcttccggttttccgcttaatatcttatcgatctggccctgtccgatgatggagtagccttccttgccgataccggtgtcatagaacagctcgttgatgtcctttaaacggcaggtacttccgttgatcatgtattcgctttcaccggaacggtagacacgcctcgtcaccgtcacctgatcgtaatcgatagccagctgatggtcggagttgtccagagtaatggcgacactggcaaagccctggggctttctcgtctctgttccggagaagatgacatcctgcatgctggagcttcgaagctgtttgaccttctgctctcccagcacccagcgcactgcgtccgcaacattgctctttccgctgccgttaggtcccacaataccggtaattccgttatgaaattcaaatacgatcttgttggcaaatgatttaaagccctgtatttcaatactttttaaatacataattaccgttggcagacggctatgcctgcctttccttttccattttcttaagctttaaaattccgtgataagcggcgactgcctccgcggccttcttcgtccttccggttccccggccgatctcctcttccccaatgagcgcccgcgattcaaagagcttgttgtggtcaggcccctcctcccgcagaagctcataggcaagcggttgatcggtctggctctgcacgatctcctgtaagatagtcttgctatcaaaaaagagctgtttatgctcgatgtcgttcatgataaatcgaaggataaactcttttgcattagcaaaaccaccgtccagatagatcgcaccgatgagggcttccatggcatccgacacgaccgatgcccttccgcgtccgcctgtcgcctcttctccctttcccagcagtaaatacgctcctaaatcaatgtcctccgcgcagtaggcaagcgtcggttcacatacaatgctggcacggatcttcgtcaagtctccttccggcctctccggatatttgtgatataaaaaatcgctggaaacgacctccagcacggaatcccctaaaaattccagccgctcattgcattccagcttattcaagcggtgttcgttggcgtaggagctgtgggtcatggcctgcgtaagaagctgcctgtccgtaaaacggtagccgatccgcccttccagctcatgtaattttttgctcattatttcctctttcctttactatgaaagaaggtgttgcggacaggcggcatcatgccgccctgcaacacccacatctattaattcagcgcgttcttaatctgttctaccgcatcaccgactgtagcgatcttctctgctacctcggccggtatctcgatatcgaattcctcttcgatacccatgacgatctggaatacatccagggaatctgcacctaagtcatctacgaatgtagaagccatggttacctcctccggttcaacattaagtacctctgcgacaattttctgtaacttttcaaattccatcttttcccttcctctctcctattctttattttcctgattttcagcagtcaggctctctcttatcttatcattaatcccctgttctttaaaggtcatgcattgaagaatggaattacacacttccttagccttggaattcccgtgggtttttaccaccagaccgttcagtccgagaagcggtgctccgccgtactgagacgaatcaaaggatttcagtgtctccttaagcgctggttttacaagcagtgctccaatcttacttcttaagttcaccatcatgccgctcttgaccttactgatcagagtggcacctactccttcgtaaagcttcaggattacattgcctacaaatgcttcgcatacaatgacatcggcaccgccatgcggaatctccctcgcctcaatgctcccgatgaagtttatgtccctgcattccttgagaagcggaaacgtctccttgacaagtgcgttccctttctcttcctctgccccgatattgacgatggccacccgtggattcttcacccccatcacatgttccatgtagatggaacccatgcgtgcaaactgtaccagatgggaagccctggcatcgacattggcaccgcagtcaatcagcagagacgcgcctttttcagtggggattaacggcgcaagcggaggtctttccactcctttgatccttccgacaatcacctggccgccaactaatatggcgccggagctgccggcggatacgaaggcatccgcttccttctttttcaccagattcatgccaaccacaatggaagagtcttttttctttcgtatggcattcaccggaggttcttccgtctcgattatctctgtcgcaggaacaatctgtatctgctccgccggaaagctatgctttttcagttcctcagctactgccggttcctgccctaccaggaggacggagatctccctgttcgcgttcactgcctgtacggcacctgccaccatctcagccggtgcataatcgccgcccatggcatctacagctacttttatcatcacaattcccctttcaagtctggcctaagataatctattacataatatactaaatattattctataaatcaatataaaatttaagaaatcaaaactcgttctgagacgccagcagatggaagaaatcatccaccggcataggtttataataatagaacccctgtaccatgtcacagcccgtatgtttcaggaaatcgatgtactctttctgctccacaccctcggcaatcgtctccatgtgaagcgtctttgcaatttgaatgattgtctctacgatagcgcagtcctgagggttaaacgctttcgtgaaaaactgccggtcgatcttcagtccgtccagcagaaggctggagatgatctgaaacgaggaatacccgcttccaaagtcatccagcatgcagacaaatccccgcttcttaaatccggggatcagacgcatcatcctggcgctgtcgtcgaaggagatgctttccatcagttcaaactgaatccaggattccggtatctcgtactgttcaaacacttccatataatcagaaaacagatcatcatcattataataggattttgagatattaaacgacagcggcacaaccggtatcccggcgtctctgcattcctgcagcttcctgcacatcgtttcaaatatatacagatccacatttctgatatatccgtttttgtcaagaaccggcaggtagtctttaataggaatcagccttccattctcatcaaaccagcgcagcagaacttctgcaccgacgattttctcgtcgctcagccgtactttgggctgcagataaggaataaatttctcctgctccacggcctccaccgcactctcttcaatctcgcagtcctgcaaatactttttagatatactgctgctgtagaaatcgtacgaggtatttctcaagtgaacgtggctgcacattgtccgggcaagctctgccttattgagcgcagtatagaaatcatcatctggattatcgatcatatagacgccaaatgaatagaagatcttcatatgggtcctgggatccgggtactgatatcctgcccagtctgtgtcataaataaactgtaccagggcctccttactctcccgctggagcagtatgacaaaatggtcggaataaattctggaaatccactcattttcgtgaagaagttcatctgtcacatcgtaaaattccttcaatatctcgtctgaggcgtcctttccataccgcagatgataccctctgaattttttgatgttgatggtcataaccgcataatgattcatccggtgcagacagttttcctggtatttttctttaatccagcgctcgttgccgcctccggtcaccggatctgtatatttttcttccagctgtatcttcatatggtatgttcctttatctgtcgtacttaatttcctgtcatccatcataccagatttttccgcttaaaaaaacctttttgaaaaatataatcgtttttcctgaacccgcagctgccacttacccttgaaatactgcctcttaccggaaacacatggatatttatcagatcatcctttataataaccgcatctggaacaattccctgataggaaagctttaaaaagcggggaggaatagacagaagaacaaaaagtcaggaggagacagacatgcagacgttggtcagagtggttcccgggcaggaacctgagcatgcggaattttatgtccatcagaaggaccgggccatagaaaggctggtggaatatgtggaacaggaacggtatcacagcattcttctgacgtgttaccgcggaaatgaaatcgtacagctgccggagagctcgatctgcttcattgagactgtacgggaaaagcagctggtacacacggatgctgaaatattggaggtaaagaaaaggctgtatgagctggagcgccttcttccgcccggatttatccggatttccaaatcagttattatgaatatggatcgggtaacggcctaccggccgatggtaaacggattgatggcggcatcgtttcccaataacgatatcgtctatatatcaagaaagtatttaaaagacgtccgcagtcatattatggaggtgcgaaatgaaagaaaatcttatggaaacgtttaagcagggcctttttcttggaatgctgctgtttatatgctctctgacagcactgcgcctggctgcaccggaaggcgtcggaccggtatggtcgctgtttccggcagtcctttccggctatctggccgcaggctgctttctgcagctgatccgcagtctggctgcgcggctggattccgcattctttcgcggtgcagcggcagcggcctggtgttatatcgttctgttctgcctgttttttccggcacagaaccttcctctgcccgtacgaatcatgcttttgaccagtgcggcagttcttttactgctgtgggaggcagaataccgttatctgaaatctgttgccagggatttaaacagtggtgcggccggaaggattctcctcatcgatctggatgaaaaacccggttcttcggaagaattctttgccgctttggaaacctactgtaaaaagagttctatcacactggaatacgtaaaaagagacattccggctaccgttaagctaaacggccgcctgcacacggtgactcttactgaatcctacatgtacggcggccctggctggtctatggaaattcaggagatcctgtaactttgatgctgtttcgttctacagttccttctccgcaaaattagagtgcattttcattaatgcgccgcgcaggatggggatgtcatcttccggaattccgaagtactggcgttcgtagattttctctgaaatacgctgaagtacagaggctaaatgcctcccctgctccgttaaagcggccatggtcacacggctgtcacccgaagactttccggtcgtcacatatccggtgtttacaagcttctttatcagacatgtgacggtctgcggtgtcctgtcaatacggcgggccagttcattcatgggcatctggccgtgcttcatcagttccataataatcgctccatgggaaggcacaatatccgcgatgccttccgctgccagctcttctgtgataaagcgccgaatctctccatcgatgcggctgatcagcgtaaaggtattgtcgatcatccgttgtcctcctgcttctttcctacatccatcatggcaccgttcagtttaaggcttccgccttctccccttaactgtctggcacatgtgagataatagtggcgggcgttggcgctcgtctgtgccctccccagttcggtcagtgcgtcggctttgagaacagaggctttctcagtttctttcctgcaggctaacagaaggtcacaaagctctgcagaccactgcgcctctccgcgcttcagggctgcggttccttcggcaagtacccgtgcgggaccacccatcatggacaccgtcttttccgcccgctctttcgtggccatgtgtcctaactttgtgggatttccgtcaaaccagcccaggtatccggtgtagatggaacggacagaccattccacggttccgtaatactcctgcagatacgggagcgatgcaagcggttccggaaggcggacgcgttcaaccagttcatccggcgtaagtccctcattcatgccctgaagcgtctctgtgagcacatattccagcgcgtcccggtaatttttcagcgttgtttccacctgccggctgccgattactgccttcgtatgtcccggaagcagatactctgccctgtattccctcatcttatccagcgaatcgatccagccgcttatgtcacggtactgaccgccgcggatcgcatataagttcggccaggattcataatagttgtcaccgcagcagagaacccggtgctgcgggaaccagacgaagatctggtcatccgtctctccgggtgctgccgccagaactgccttaatgccgtctgactccagttccagcagctcctcctcaaacagttcactgcagggaagattccccttctcaccgttaatttcatttcgcggtccgattccgacacagatgttttcttccggcgttaagccaacgccaaactgcctggccccccgcactccgcagatatcccggatcataccggttctgccgtattgagggtaggtcggtttccttccaataatccgcgtacccggttctgcaaataccgacgccccggaggtgtggtcgaaatggaagtagtgggtatagataatggtcctgatgggcttatccgtcagctttttaaacgcttcctttacctcctccgccggagcggtgccgtttaacgtatccaccagaatacaggaattctctcctataaccagcgtacaggtactgccgccataccccagtgcaaaatacacattgtcacagatctttgtgattcccttcgggaaaccgctttccgcctgtctttttaacttttcctcgcctgcataaatcatggtctgacctcacttttctatttaacttcgatatcgaagcttttgataatattataatacttcgatatcgtattattgtcaaatagaattgatttttttcagaatgtctcctcaaagaaacattctgccctcccatttcgaaccatgaaaacggatcaggaaaaccactgcccggaacatccagtctaaaaacatggcgaaccatacgcagatgacgccaatatccaggatttcccggaataaagtgctgcacccgacgcggaacacccacatggagatcatggacacagccatggtaaagcggacatcactggcggctcttaacgcgtcggatatattaaaagccggcacccagaagaagagacacgccacggcctgccacctcacaatttcagaggccagttcccacgtctcgcggttcatctgatagaaacccaccaccggtcccgcaaaaatccaggataataccgcggccgctcctgtcaccagaaaggataccccggtgatcttttttacgtaatacctggcctgctggatctctcctgcgccgacgcagcggcctacaacggtaatcagggcgagaccgatggcaaatccgggcatatgggtgaattcagagatcgtaagcgccaccgcattggcggctatggccgccgttccataggaggtgacaattccctgtaccagcagttttccgatatggaaaatgctgtcctccagaccggttggaaccgccagcttaagaatatttttcaccatgaagccgtgccagccgcttccaaagaaggattgaatccggacagcccctttatgatggtataaaaaaagaaagatggctgcgctgctgacggcccgtgccagaaaggttgcaaatccggccccgaacacgccccagtgaaggccaaaaataaatacagcatttaacacaatattgatgatgctcataaagaaggatacggaaaatggcagcgcagcatttcccatggaacggaaaatggcgccgcagctgtccagcatcatcagaaacggataggagaccatggaaaaacagaaataaatcatggcctggcggagaacctccggctccgctgaaccatagagaccgtataccaccattctgcgaaacaaaaaacacatacctgccactgccagggagaacagaagggaaatccccagcagatgctttgcggcaagattggccatatccgcttcccgttttcccagatactgggtacagacgatggttccccctgtcaccagtgcggcaaacatgctgttaaataaaaggttgatggagtctataagggaaatccccgaaatcgctgtctcccctaccgaggcgaccatcagcatatcggcaatcccaatggtgcccataattacctgttcacaaaccagaggtactatcagctttaccagctgctttctgtcaaataacatcttatcacttccgtctgtccgcctctctcctgccgtcatgaaagatgcggcagtgtctcaagaattgagtttaaataggagaggctttttttagcggcagtctctgtatctggcgcattcgtgatttccagggccagcgctccgcggtaacctacacggtgcagggctgtcagtgtttccgtgaaattatagtgggcatgtcccggataccagcggttattatccgccacatggacgtggcagacggcactgccggcgctttcgatcgctttgccgatatcgtcttcctcgatatttaagtgaaccgtatccagatgaagcttcagccggtcagagcccaccgcacgcaggagcccggaggcctccctgatcgtggttccataatcgctctcaaaccggttcatcacctcaaagcccagggttacgtcgtgtgcttttgcttcctttgcgcagagctttaagctctccgtcagattccatttaaatgcttctccatcctggccgcagtcggaaaatcttcccgcgatgagaccgatgataacgatgccatggaacggggcggctgtcaccatgtgtccggtcagacggcgtatggccgccgcccgcttctccggatccgagcttccgagacagatgccgtcccgctcataggcggaaccggttccgatggaagtgagaactacgtgattctccgccaacaggcggtataaccgttcccggtcgatctggtccgagtcgtaaatgtgaagttccacagcgcggtatcccagcgcggccatctggggaatcgtctcctcaaacggtccccgaaacagaatgggatcatctccgcccgcagccgtacttgccgtagcggcaatcgtcatactcatgttctttctccttccgtgccggaattgataacagtactgcctgtcatggtttgatttccggttatttggccgatatgttcaaaaatcatgggctcgccttcacagccgcttatggagacgtcgttcaacaccagtttctggacattgttgatgtagagtcccatttttgcagtcagcccgatgtcatccatcatggcgggctcatccggttccggattttcatcgtaatcgatggtcacatggtcgaattccacgtaatctacctttttctcaggaagtccatacagaaaagctccggctacatggcagttgtgagcctcgatattgcggaacaccatctgcttcacggagggcgtccgctcatccaccggaagaggcgacttgcatttcacataatcggaatggcagtcgggatcacagcagttgtaaaaggaatttaagacaaagggagtcagcacatggtccatgcggatattctcaaaacagatatcttccacaacggcgtcttttcctcgtccgcgcctcgtcttgatccgcagtccgcggtcggtgtgcaggaataaacagtcttttacgtgaacgtgtttcactcccgccgccatctcacttccgattgtcaccgcgccgtgtccgttgttcatacagcactggcgcacctcgatgttctgcgacggcaccttgtatttatggcccatatagtatttcccggacttgagtgcgatgcagtcgtctcccagagaaaaatagataccggcaatttccagaccgttcaccgattcgggatccattccatccgtattcggggaatcccatggatttaagatcgtcaaatcgaggaaacggagatcatccgaaaaatagggatgaagattccaggaaggactgttctgtatggtgactccgtgaagaaccacgtggtcacagtgatttaaaaataccatacggggccggaatgctatgattttggccctgtcgtcctcccaccagtcgtcaaaggtggcgcatccatctagggtgccttccccggtaatcactacatttgacacgtgaattcccgtaatcatgctggtaaagatatcgagaggatttccctcccacgatccgagattatattcccctgtctcatcatagctctgaatcataccgggaagcacaccgaacttctcccgctctgcatggcccaaaagcacggcatttttaccgatgtccagtgtgaagtcactctttaaaaacaggctggtcacaagatacttcccctccggtatatacactctcccgtctttcggacaggaggcgatcgccgtctggatggccagcgtatcgtcatggatcccgtcacccttcgcgccaaatctccgcacgttcagcgtgacaaattcatagtcagtgcggacggaaaactcggaacagatgtctccgccgcaccgcagggttacgcggtactccgtgtcgggtgtaaggcccgacacggtctggatcacgcggctgcttgtcagaacataccggccattcagccacacttcatactctttctctgtataaaagactccgaagtcctcccactccagcagaaacttccgggaagtcttaaaaatcacgtttgctttcatatacttacccctttacacctcctgccgcaatgccgtctacgaactgatcctgcgccaggaagaatacgatcagagacggaagcagggtgataactgacagtgccagcactttgttccactcaaagccggtttccgcatctgtcaagaggcgcaggccgagggaagtcggatactttttcacactgtcgatatagattaacggtccctggaaatcgttaaacgcccacatgaactggaacagcgccacggagacgatcgttggctttaccatgggtaccacgatgtataccagtctctggaaggaattacagccgtcgatctccgccgcttcctccagttccctggatacggaccgcatgaactgaaccagcatgaagatgaagtacggttcggctccgaagaaggccggaacgaccagcggcagataggaattcgtccatccccacgtccggaataacaggaactggggaatgtttaagacaacctgcggcagaaacagcgtcgccagcaggatagaaaaccagaaattctttcccggaaactcgaaccgggaaaaaccgtatgccgttacgacactggccaccaccgctccgatcaccttcggtatgacgatcttgaaggtattgatcagataaagactgtacggattgcccgtcgcggtccagccgtcgatgtaagcctgaaacgacggactcttcggaagaaagctgatggtcgagtaaatttcattgttgctggccttaaaagacgcgcccaccatccagagcatcgggtaaaacatgacgaagccaaccagaatcagaacggtatagcgaaggaccgtgctgacctgttctcttgttttcttactcatccttatcgtcccccctatctctcatcatccgagtaataaacccagtacttctggctggcaaaggaagccacggtcagagtacagatgataataaacaacagccacgccatcgcgctggcaagtcccatctcatacgtacggaacgcattctggtaaatcagcagagagatcagcgtcgtcgagcccaaaggacctccctttgtgatgataaatgcgctgttgaactcctggaatgcctcgcagagctgtgtgatcagattatagaaaataaccggtgtaatcagcggtaccgtaacagagaagaactgcctccattttccggcgccatcgatcgaagcagcctcgtaaagttcctgcggaacgccctttagcgcagccagaaaaatcaccatggcggaaccaaactgccacacgcgaagcaggcagattacgaagagtgcatagtgggtgctgccaaggaaattaatcttttcaccgccgaacatctggataaactgattgattaaaccgtccccctggaaaatgaatttccacacaaccgcgattgccacggaacctcccaggatggaaggaatgtagtagatggtccggaacattttcacgaatttcagtttaaagtttaagatatatgcgatgaacagggaaaacgccagttttaacggcaccgtgagaaacgcatattgaaatgtgaccttaaacgcttttatgtatttctttgtatgaaatatgcttaaatagttatcgagaccgatgaattccgttcccggcttaaataagctgtagttagtaaagctgtaaaacagggacatgataaatggataaaatttaaagatcatgaatcctattatccatggaaggatgtagaaaaatcccctgtatttacggtaaaaattcttccagtttcgtgtctttgcaggctgtgcttccatactctcactcctatcaatccattttcatcagttcggccgttaccatcataagtacccccacggcctttacatcatcatcaactaccggctccgataagtagtaggcgatgcttccatcccgttctgtacggggtcccagacctgccactgcacacgttccggataaatggtaagctccgtcttctgcctggtatatgttctgttccagcacggcatcgtagatttcttttcctctttcggcatatttttcttccagaagagcgcccagacggcagccctttaaaactgcgtaggccaccatgagcgaccctgatgtttccaggtaattcccctcctgatccggcagtgcaggaagctggaagaacagtttgctctccttatcctgatactttaaaattccgtgaaccgcctctcttaaaagctcaccgaatctggctttcacctcatagatttcctcggaagccagctcatagcaatccaccagcgccattaaataccagccgatggagcgaagccagaagttgggtgacagccccgtctcgggatcggcccattttctgtctttgtattcgtcgtaagcgtggtaatacaggccggtcttctcatcatagagaagcgttcttgcctggttgaactggttcataatatcgctgtaattcttccgttcgttaaaacggttttcatactccatataaaacggctgtcccatgtaaaggccatccagccagacctggaacggatagatcagcttatgccagaagttgccggtagtcaggcggggctgataggtcagctgggtcatcagagtatcgcacgccttccggtaccgctcctcgcctgtctcatcatagagaaagtagaagatttttcccgcattgataaaatcgagattgtactcttcacggtggtaactctttatcgttccgtcctcttcaatatagggactcaccatctttacgataaaatccagatactcccggtctcccgtcagctcataaagacgggaggcgccgacaaataagcagccgtcctcataattccattcatacatggactgaccatcaatttccaccagataatcgtcgagtccctcgtaatttttcatgtattctttgaagaatggtgtcagattcattaaatacagctcctcctttttatttttagttgaattttccagacatttggctgaaaaagggtacaaaaagggaacgccgccccggcagcgtcccttttttgttatatcctgtcactcttaattagtatgggttagccgcattcacgtcattgatggaatcgattaggtactgtgccatctccgccggatctgctcctgcgcttaagttgtcaaatacttcgtagtaagcgccggtacgctcctttaatgcagagttctcaaaattaggatcaaaggtataatgacagaacgcaagcaccttctggttgccttccagcgtctgaccgcctaaaatgtccgcatcctccagaatcttcttcgcagctgtgttgcacacggttccgcgctcggttcccattaatttcacgccattttcgttggaggtgatgtactccagaagtaaggcggcctcttccttgtgttcagaggtctctgtaatggcgaagccctgggaaaccttgctcataccagccggattcggtcccaaatcggtcgggtagtcgcccagtaccagctcctggccttcatctaaagagtcagcgatttcctgaacgttggaatcatactcggtcagtcctgcgtagtgtccgtccatccacttcttgttggataagaaattttccgcaccgtccccggcaatggtggcgatcttcgggaatacatggtcttcctccagagagttgatccattccatgccctctgtcacttcttccaccgagtaattgacggataaatccttaatccattcttttccgtacttctcctgcaggtacatgaccatccagatcattctctcgtagccttcctcggccagcggatagtaatcgtcgcccagtttttcctgaaatgcctttcccgccgcgcgaagctcttcaaaagatgtgggaatggcaacaccggccttgtcgaaggtagtcttgttgtacatcggaagctttcctgtgatggaaatcggaactccctgaagctttccgccgacggtcatggctgccaagttggtctctgaccagttgtcaagggagatgatgtctttaaactgatttaaatctgcgaacttggaaccgtcggatgaaaactggtaaagccagttccagttaatctgcatcagatcaggagcggttcctcctgccagctgggtggccactttatcggtccagccatcccaggaggagtattcacattctacggttacccatggatattcctgttcaaatgcctcgacggccgccatggtcgccttatgtcttgtctcaccgccccaccaggagaatctcagggtgaccggctctttaccatccgttgtggatgcgccgcctgcaactgtggctgcctcctgagacgtctgtgccgccgcctgtgtcgtttcttttgcgccattgcccccgcatgccgtaagtgatgctgccattgccgcagctaagaccgcagccgttattcttttcatcatattaagtccctctccttgtatgaattactgagctttttttgccgccagctctgcctttgtcagttcaatctcaaaccagacgtagttcaccgtctcatccggttcaatttcaatcgcatgttcaatgtcggttggaatgaaggcccagtcgccttcgtgaagctcgatctcctcatccgccgcacggtagatgaatttcgtacccggcattccataataccactgataaaggttgtcgtggctgtgaggatccgccttgttcggtccttttccgatgatggcgcccatcgtcatacgggtaagaaaatgggtatccagaatagaaagcgctttgatgccttccggacggaagccttcaatatattcgatgcagccgctcagcggacaaaatctcggcagtgcaatgtgccagtgatcgaactgctcgtaatcttccggaagcatgacacaagtcagctgcaaaaattccatgtctgttacggcgtgtaaaagattctcttctttgtccatgtttggaataaacagagacggttcctcgatgttaaacgccttcttcggtgtggccacatagccttcgcctttggtaaagtaataaatctgtgtctgatcgccaaaggtttccagcgtcaccacggttcctgctgccaccctgcatttgtaggtatgtacgccttccaccatgcccggaagcatctctgcccttaaaattccattgcctgctgtctcaaacttcatgtcttcttttttctgataatgaatcactgacattttgaataacctccctaattatgtttcatataatctttccagagagattgataatcctgtaaaacctcctcccggctcaaatcaccggttaagtaaaagccccagagttcggcactcttatttttcagttcccccggaaggcagttgactacgtcaagcgcggtctcgccttcgtttatgcttttctttacttcggccgccagaggagacagcccctctaagctttcgtcgttcatgtccatgaccggaagacagcccatcgtctcttttaaataccgggacgcttcctccgatgtggcaagccagtaaaggaactccccggcttcctccggatggcggctgctttttaccacagacagcgcctgcacttccacgatcagcttatttctctccgcttcctcgtagagggggatcgctccgatggaaatatccttttccagtaccggtttggactttgccagaaccggcgcaagccagctgccctcgtcatttagcattgcgtatttttcgatgaagaagtaatctctcgcggtcggtgctcccgtcgttaaggaatcccggtttccgaagcgaagcgtcagatcaaaatagtccgccagcgcctgccagttttcttcatactcctgctgccgctcctcttctaacagagattccatatatgcggcaggattgtccgccgccatcgcaggaagcatgaataagttattggccatggtgagcagcgtctctttataatggttcatcatgggctttatttcctggtcttccagatccgtgcataactgttcaaattcggattttgtgacgggaaaacgatcccagccggctgcttttaaaagctttctgttataggcgatcccgatcccctgaatctgaatggggactgagtagaccgttccctccagacttcccatggtgcggtacggcatcggaagcttctccagtgaagtgaggtcttccaatggaagcaaatggtctttccattcttccatggagccctcaaagcctacgcagatgatatccggaagcttctgtgatgccagactgacccgcagcaaatcggaatacatactgcggtccaccagattccactcaatgcgttcaatctccgggtgatccttttgatacagtttttccagttctttcccatagccgccccattcagaagacggcatgctcactgtcagcacaattcccggttctgcgggtaaatccgccgcatcacgttccgcattttggcttccgcaccctattaatcccagtataatccccgctgttatcaaaccagttttaatccttctcttcatcgtaaaacactccccctgatggattgatatcacaatatttcttttagtataccatgacactttcagggaggaaactaaaaatagccatcactctgttttctggattctctctctctttctttgttgtgacttcattgtaatagaatgcggctcttttttacactcacgtttttgatatgataggaggacaattttgacttcaccgtttggaagaaaggaatgcacacctaaacacttaatgaggtctttcacgaatttagtgtttatggtagaatggtgtcagatcactgtggggttgggggaaataagtgtatgaacagtcagcgttttgtcagcatccgaatcaaattattatcactgctctttatctgtattctcgtaccgtttctggtatactggttcttttcctacgagtatatcaaaacgtctctggacgaagaatttgtctctcagacgaccgatacgatgcacgccaccggaaacagcatttccgactatgtgaagctggtggattatacggcgcgcggtctctactttaactccgaggtcatggatattctgtcgggaagggaacagtctgtatccagctaccgcctgcttcagacggaatcgcggatctttgattttctgcagacgctctattccagtgtgccggacgcctcgcagattcagctttccgcatttaacttaaaaaaatccctgctgctccagtccgatatgcagcggtatgaaaaggaccatatttacttaagccaggagcggcgtttcccctgcgaaccgtaccactcctatgtgacatcggctcatatgcagtccaactataatttccaggaattgtccggaagagaattttccctggttttttctctgcacatgccgatttaccagattccttccgtcactgattccctgggagaaataaccatcgacattcccgtatccgtcttagattccatctgttcccccctgtttaaggaaaaggaatacctctgtctggtagatgggaatggaagttacgtctacagcagcaaaccggaagaaatagccacacagacccgcaatccggttattcaggacattctttccgcctccctggaaccgggagaccccgtggtcctcgacgcggattccgaggatattgttatctgcagccgcatctcggaggctccggtggactggtatttaatcaaaatatcaccgaaagcctttgtatatgaaaaggcaagccgcttcttccacatgatgctgtactcctttatccttgtaacgctggcggagattcttctgatcgtcataaccgtcattcgctttaccgcgccgatccgcaaggttacggcctatgcggaagccgtcagtgccggcgatctggatgccaatatgtcttcctatatcacctacacgaaaaatgatgagattggatcgctgctcattaccatccgaaagatgatgtactccatcaaaaacttcatcatacaccagtatcagctggagctggcaaaccggacaagtgaattaaaggcccttcaggctcagatcaaccctcactttatccacaacacgctccagtgtctggcaaccaatgccttagagggcggcaatctgcctctgtaccagtccatcacggctctgggccagatgatgcactactccatggataccgctcacaatctcgttcctctaaacgacgcgcttcattacatcgagctgtatttgaagcttcagaagcttcgttttccaaattcactggagacagaatttgatatatccgatgaggcgggaaccatgctgatcccgaagatgacgctgcagcctctggttgaaaattccatacgccatgggaatctgctgaagctggaatgcagccgcttaagcatccgtgcgtatgcagaaggcaactatcttcacctcttcgtgatcgataccggaaccggaattacggcagaaaagctggaagaactgacccgttctcttcatcaggtaaaggcagcggcggcttcctctgacgcggtaacctttgtcgactccctaaaccgcttttcaaaagagcagccatcccgcagttctgttgttttaaagagcgaacagcagctggaggcagataaggaaaaccggtacgtatcaaacaacatcgggatgcagaacgtctatcagcgtctcctgctgaattataaaaaccagtgttccatggagattctttccgatggaaagactggcaccaccatacatatccaggcggactaccggatgctggaatacacagaagaaaggagcaggtcatgaaagtactgatcgtagatgatgaagcccacgtgatccgggccgtaaaacttcttgttccgtggcaggagcttgggatcacagaaatccatgaggcccttacgccccaggaggcgatccgtatcatggaggcagagcagcctgagatcctgattaccgatatcgtcatgcaggatttatccggcattgatttgatgaaatatattacgggaaccatgcagcacatcaaggttatcgtcatttccggctataataacttcgactatgtgagaagttccctgcagcatggaggtgtggattatctcttaaagccgctggatcaggaccagctgatcgcggctgtaaaaaaagcggtcctcgcctggaaccaggaacacaatttgtatcatacggctctggtccataaggatcagatcagttccatgacggccttatgccgggaaaacctggtgtcaagactgattcacggcgatcatccggagcatgcatacaataagctgacagaactgtctcccgaactgtccggcctcaccgactgcgggattgcctattttaatgccgagccattcgtccttcccggggatgattcctggaaagaaccgtttcaccgctatcgcgattccatttctgctttcttaaccagatggaatgccggttttctgcttccggctgaccgcgtccacgagatcacggcgtttttgactgtatgggatccgtcattaatggaaaagctgaaggaattcctgacagacaggcagagcactctgccatttcctgcatgcatgggaattgcttccggccgttttcctgctggaattatagaagtataccaggaagccaaaacggcattcggcgcctttgatatggctgtcttttctcctgtatctgtcaaaacggattccctgacgcaggtcatgcaaattcgaatgacagacagtcaaaaggagctggataaccgcatgctgctctccgcctttctaaccggcaatgaagagctgatcgctgacagccttgctctctggatcaaaaaccgcacggcaaattataacccgcatctggctgtcatatggaacgccgtacaggatgaaaaccagctgattgactcatgggcggatctgctgaaacaacgccataaaggctttgttcacgcttccggctatcaggttatgcgcttctgcgataccatggatgaatccatgcatttgtctttcccccgctttttgaagcggatgcaggcggatatctcgtttctctatcaggaacttaagtctgtacacgctccggaggcagacatgatttaccaggttgcccactacattgaactgaattataaccagcccttcagccaggccgcctgtgcgcagatgtttttcgtcaaccaggaatatctctgccggaagttcaaacagacgtttcatgtgaccatgattacttatttgaacaatataagaatcagccatgcaaaggaaatgctgaaggatcccctggtaaagatacgccagatcgctcatgaagtgggatttgaggacgaaaaatacttttcgcgccagtttaaaaaatccgcgggtatgacgccgaatgattacagagcgctttatatggaaaatattggggagtaagacagagggaacggaggctgccgagaagtgtggttcctcataaggctgagagagattttgggattttcgttccgccagggagccgggtccggaacgaaaatctcgaaatctcggctaaagtaattgacgaaagcggcttttcataattctgtaagtttacaagtttatcctgcttcattgccgtttttacttgcaaagtacccgacaattgtttatagtattactatcatagttttgatcgccgcagtattccgctgcgctgcatcttctgctacttcaaaatacagaagaatccaggcattccgccaaagaaattccacattattaaatctaatactgaccaaggagaaacgtgcttatgaaaaaacgcaaactggaagatttaaacctgatggatgatttcctgtttcaggaaatggtttccaaagaaggaatcggggaggaattctgccggattcttctcagtacgattctgggacggcctatacagaaaattaaagttatccctcaaaaagttttactcggaatcgataccggcagccacggcatccggatggatgcctatattgaggacaggtccggagacgatattgaagttgccgcagatatctatgatattgagcctaataacacgtatgaaaaagaaacactgcctaagcgaacccgctattatgatgcccttattgactcgcagcttttggagacaggcgcagattacagcaaattgaagaatgtcatgattattatgattcttccttacgatccgtttggcatggatcgtatggtatatacggtgaaaaaccattgtctggaagaaccgtctgttccttatgacgatggtctggtaaagctgtatttgtatacaaaaggcactgccggaaatcctggaaaatctctgcgcgatatgttaaaatatatggagaaaagcacggaagacaatgtgactgacgatagcattgccaaaatccacaatcttgtcaataaagtgaagcgtgataaggaggttggaattaattatatgaaatcttgggaacgggaacaattcattcgcagggaaggacttgaagaaggactggctgaaggcttgacggaaggtcaaaatcggatcaatcagttaaatcttaagctgattgccgcctcccgcacagaggatatgatccgtgcggccggggacaaagaatttcagcataagcttttagaagaattcggagtctgaataaaaatcagcaaaatcagcccacacagcattttccaccctgctgcgtgggctgatttttcgtttaatattctgtcaccgtttcattttatgagtttcttttttctttgtatacatctttcggtctgtaggctccaaaatatcagatacggctgcaaacggcagttttcccacctccaccaccccataactgaccgatggccggatcggcacattctgctctttgaaagtctctttcatcttctgacaggcttcttccagcatgttctccgcctcttcttccgtcttatccggaatcaaaatcagaaattcgtcgccaccaagccggcatatgttgtcatcaccgaaaaaatcagccatcatccgtgccacacccgtcagatagaggtcgcctgccttatggagtgggtataatcagcaggtaaacgtcaatgaacatcagtgaagtggccgcaaaccgcagctgccgtttatttccgattagaatctgaatggagttctggtcaaacagcctgtcaaatatctccaggcatatgatggaggccagaagaaccagcaggatcagaatcagatacaggtaattcccctgattatcctctgtcactatattatatgatggaaataaaaaagtgggaagggcctgagttaccatgataaacgacagatgactaagcacacctggcatatatcataataactccggcccttcttctattttacaaattgaatcttacccgcagtcacgcatttccctgacttccggtcaaacagcagaatatcgtttccttcgatatccacaccggtcttctcaccgatctggtaagtgacgcccccaaagatcacccccgtcagcaggtaatcgccgacacggagtttcacggtggactccatacctgtaggcatggctccgtagatcgtagcatttaagcttccctgaccggcaggactcagcttaatgcattccggtcttacgccgatgacaaagtcttcatctgtgatcacaggatcgtcttccaccgcgtaatcgctctcgtcaaccttcgcaatatggtatttaaaggtctcgtctttatttcctttttccacggcctttttgtcttttaaaatttcctgttttttcttctcggcctcctcatcagcctggttccgttccataaaccagcgatccatggaaagcggtttttccggcaggaatacggctttttcaccgtccaggacggtcagctccagggaaccatcagttctctgtctgccctttgcctccatgaagttgatagaaggattcccgacgaaatctgccacgaagagattgcgcggacggttgtatacatctaagggggcctcgtactgctggagtacgccgttgttgatgagacagatctttgtagccagtgtcatggcctccatctgatcatgggtgacatagacgaaggtactgcccgtctccacatgcagacgctgaagctcataacgcatctccagacgcagcttggcgtccaggttcgacagcggttcatccatgaaaagcaccgcgggttcgggagccagggtcctggcaatggcaacacgctgctgctgtccgcctgacagttccgccgggtaacggttcatgaacggtccgatcttaacgatacgggaaacacgtctcaccgcctgttctacctcttctttatgaagctttctgttctctgtcaatagtttcccgccgtttactacggcaaattcactgtttaattcctggccctttcctctgtaggatgcccggatcgaatccagctttgtctgcagttctgccgcttttgccttcgcagcgccgtccgggtcagaactctcatgaatcttaaagtcaaacagcgtttttgctgtgtagatcgacagcgtgtaggcgtcaatcagttttaaatagaccttatccatatccagtctgccctttttgtcccggcactcttccaccagctcggcgctccgtttcccgttcttcagggcctgtatcaaatcgtttgcagtctttgcttcgaaatcaatctgaggcatttcctccttgatgttgctcaaaccgaaggaaatgttctgataaaccgtcatgttgggccacagcgcgtagttctggaataagaagcccactttacgtttgttagccggtacattgatccccgcctcactgtcaaataccacccggtctccgatggaaatccgtccgctggtaggtgtctccagtcctgcgatcatacgaagggtcgttgtctttccgcagccggaggggcccagcagggtgatgaaagaattatcttctatttcaaggtttaagttatctaccgcgtagaacttcccccatctctttgtcacatttgtcaatttaatttctggcatgttaattacctccgataccgtcgtccagacttgctccggtcagtttatttactaatgtgttaaatatcaggatcgttacgatcaggattaagttaatggcgctggaaaatgcatataatcccatttcatcaaagtaatccagagtcgtggaaagtatgaagccctgcgtacagagaagcaggaataaggataactctcttaaacacgtcataaacggaagcatatatccgctgatgatagccgatttctgaatcggtatgatgattcggaacatcctcttaaaccatggcagatcctgaataatcgccgcctcctcaatctcattgctgatctgaagcatggagtttagggcgcttctgctggcaaatggtatgtacttgatggttcctgcgatgattaacagcgtataggtgttgaacagattgatcttttcgttggaaaagagaatgaagaacgcggcgccaacggcgatggaaggcattaagtacggcaggaatgccacgccatttacgtagttggcccatttgcttctcctgttcttggataccgcatatccaattaaggtaccgatcgtaccggcaatcagcgcacagcatacggagacgagaagcgtgccccagaatgcgtgccagatcgtggagttatataagattcccttctgcccgtacatcccgttttccgtgatattttcactggtcagccaccattttgttgtcaggttgcttaaattttttgtatataaaaagctgtaatctcccgggttcggaagaaaggtttccagtgcaaaggaaagaattgggaatatacttgtgaagaaggtggctgcaatcatcacaataccgatgacatactttcccattttccccagattgatcttggagagctggcccgatttacctgtaactgtggtataattctttctgctctttaaactcacctggttcatggtcagaattgccactccgaataccatcatgataatggcaagaatactggcctcaccggtatacttggagttcatggagatatatttggtggatagcgtcgtaaagcccagataatgcggtaccgggtagcttcccatggcgcttccgaataccagaagtacggtggacagaatagccggttttaccattggaagggtaatccggaacatggttttccatttcggcgtatcgagaatggtggcagcctcttccagattggcatccatgttgcggaaaatgccgccgatgaggatataggcaaatggggcgtagtgaagccccaggacaaccgcactgggaaagagtccctgacatacccacttgggcgccagtattccaaacagggaggccagcagtccattggccgttcccaccaccgcattgctgttaaataaattctgccatacaaccgccagagtccactgaggcatgatatacggaaaaataaagatggaactcaaatactttttaaattttaaattggtcctcgtgacaaggaaggcaaacacgccgccatacaggatcgagataagacaggtcaataccgctaaaagcagcgtattccataacggtttccacagattcgttctggccagccggctggtaaataagtcaacatagttgacaattgtatagcccgatgcctttcccgttaaatgggcatcgatggttcccggatggatcatgagcgtatccttcacaattgccacgattggtgcaaccgttgtaaaagtcagcacaatgccgaacaacagaaggatgatattctgcggtttggaaaagtatgtcttgatcttattaagcacgatgaccttattgtttgacttacgattaactgtctggtccatagctaactccttataaaatgggctgccgcattaagaacagccttaatgcggcacacccgttatcttattgctgcgagtaatcggctactgagctgaatcgctgtattttgtcagcagctcaatccagcttcctacggtaaaggatacatctgcgcagtattccggatcttccagaaccagctcgccgtcggtggtccaccactcatatcctctgtcattcttgctgtcaaattcgttttcgcccttgtcgttgtaaccgcccttgctgtggccgtagatcttttcagtctcttccataacctttggattggaagaataaccgcccatatctttgccccatgcggagaatccgtctgccgtgttggtcatataagcgatgaatgcacaggaggtccacggaagcgggctgttgttggtcaggaataagtaatggcagtagccgtagccgccgatgcctttatagccatcctgataagccgcaaccttgatattgttaacagatacttccgatgattcctctacggaacggagctttgaatagacgagaagtccgcactggtcagttgccgtcttggataccagtgtgttgcagatcggaccgtcatcagtctgctcattgtagttctctacccagagcttgatccatgcgagagcgtaggcgccgttttcaccgagccccaaatcagcgacatccgttgccatctcgtcgatgaccggtttgaaataagcctgtttgctgctgtctaatgcatcatacgcgtcttttaaccagccggcatacttatcttctgtcagcatgtacaggaagttcttgcctaccacctctgagtcaatatccatgtataacgggtgaacgccctctgccacgaaatcccagcagttgttaaattcagcagttcccgtagagttgtacataaatactttgttcagtgtctgtaacggaagaaatcctgtgtacgcatctgcggtggttccgttggcctccgcccattccttcggaataaaggtctttaaaattccggtctgaaccatcttggattcaatctgattgccatcctggatcagtgtcatggcaaatgttccggtagattttaaggagtctgccgataactgttcaaagatcttattgttctttggctgctgccattcatattccatcgtataggacggatcgaccgactgtaagtattcgatgaacaacggaagggctgtctttccacggctggagtttccgactccgtagaacgtttttccgttggactcttcaatcgccttctttgccagttcttccatactcatggactcggcttctttgatgatcttctctacttctgaaaggttcccatcatccgctttcggttcctctgcctttgcttcggtctcaggagccttcgtctcctcccctttcgcagcctctgtctgggctgccggtgctgcggtcgttggatccgctgccttggaaccgcagccggccagtgttgccgccaacatggtactgattagaactgctgataaaatttgttttttcacttcttactcctccttcttcttttcctgccttttcgatgctgcagcatcatctgatgtactcattatatctggtctcttcgtcattttgaactggactatcctgttattcctttgtctattctgacattttgcattattttttcgtttatgcgcatttatttttatctatattgtacgcgtttgctctgaaataatcagaaatcccagtgcggattggtgattatttctgttcctgacactgtggtcactgtattttttcatataccatctgtttcaatgactacctgcttatgatatacttgatacaatgaagaaaccagaaaaggaggcaacacagccatgaagcactatatcatcgtaaaattttctgaaactgtccaggagaaagccgccctgtatcctgaaatagaaactctctttaaaaaggcagaaaaaatagaaggtatccaccgggtatccttctatccttccgtgattgatctgccaaacagatacgattttatgattttgttggaaatggaacgaggcgcgcttcctgttttcgacgcctctgatattcaccgcgactggaaatcaaagtacggcagcctgctttcagcgaagacgatctttgactgtgactgaaccacggaaagacggggaatcctctgcacgctgaatcagcgtcagagcgtccgcagtcttccggccgtgtggtcctaagaatttgcagcctggtattcggagggcgtaactcccgctattttcttaaatgtgctggaaaaataggtgatgtcgcggtatccgaccatctctcccacctcgtataccttataacggcagttggttaaaagcttcatcgcttccctgattctgcagcgggttatataggccatgacggtgtaatccgtctccttcttaaacagatgacttaagtgtccctcgctgattcccagagactcggcgatggtgcccacacttaagtcactgtcattatagtgttccgttatgtaggcgatggcctctttaatatatcggctcttatcgcccgtcctggctccgggcgaaagaatctttgactcttcccggcgttctttttcttcccgctctcttaccagcttatcccgtacccggctgaccgcgtcttccagttccccatcctcaaacggtttcagtaaataatcgaaagccaggagctttaacgcatttctggcatattcaaattcgctgtaggcggtcagaaagatgacggagacatcgtttccctcttcccgaagaattttcagcatctcgattccatccatcttcggcattcggatatcggaaatgatcagatccggattgtatttacggcacgcctccagcccttccagaccattcgccgcctcaccggccaccatacagtctaaggacgcccagtctgtctccataacaatcccttttctcacaaatacctcatcgtcgattaccaataccttaagcatcacataactcctctccctgtctgaccggaatcatgatggtcaccttcgtgcctcctccttccggcctgcagactgacagtccgtattctgcgccgtagtgcagccggatgatcgtgtctacattataaaagccgatgtgtccaagacggagcagcgcttcctctccgccttcttccgggacgcctgctcctgctccccggttatttaaatggttcagcacctcgtcgctgattccgcagccgtcatccatcacctctataaagagccgtccttccttcgaacacgccctgacgagaatatggccttcctcacagtctttcaggccgtgtatcatggcattctccacgatgggctgaacgaccagcttcggaaccacgcagcccgcaagttcctccggaagctcgtaatcaaagcagaactttccctgaaaacggatcttctgtatctctgcatagcagtccacgagctccagttcctccttcagtgtgataaactgggcgttggagatactggtccgtaggattttcgccagctttgccgcaagcgtggcgatctccgggatgtggttcgccttggcaacccatttcatcgtatccagtgtattgtacaggaaatgagggtttaactgagcctgcatcattgcgatctgcacctcattcagcttcttctgctggctgacctgcatttccatatacgtcttcagctccgatgccatggtattgaagctttcggaaagctggccaaactcatcatttctcgtggaatggactcttgcttcgagattaccgctctgcacctcatgcatcgcctcattcagactctgaatcggccgggacagatggttgctcatcttggccgcaaccgctgcacaaagcatcaggctggcggccgtcataacaattaatacgctgtacatggatttcgtcgtatcggctgtaaatacctttggccggagaaaaacgctgtaaagtcccgtcctgccaatttccgatatataaacgctgttgttgtgaaagggttcatcgaccgcttcgcccgccatcaggcggcgcctcaggaccgccccaatctcctcgcggactgcggttccggtactgtagacaggttcccagaaattatttaagatacagattccatcctggctgccgtaagtaccgcccagaatcttttcaaaattggatccgttgatgcttaccagaacgtagcccacactgctgtcttctgaatccaggacagggcgggcggcccgcagcagaatattggaagatccggaatactccttctcacgacgtaccgtcatctcatccggatgggcctctgccacctttaagattccccagtaaaccgggagctgagtgtgaaacatgcctgcaccggtggaatagagacagattccctcctccgagtagaggtcaaactgagccatctcccgcaggctggcagtctcctcgtacagtttcgcatagactgcgcttcttccgcggtttcccgattctctgatggaagcggcgatctcaggctctttactcagatgcagcgtcacgtcatcgatggtttgaaacagggtggtcagcttctcctccatgacggccgcctgttccagatcctttttctgatagtcgcgctccagtttcactttgaacatctgaatcagaaagatacagctgagtatcagaggaagcagcgcgacggccacaaagcttacgagaagttcccgtttaaacgattttctgataaagttccacattgcttttcctctctaccggatcagttccgaccacagttccaggatctcgtcctgatgcgcactggcccatttgagatcgaaatccatgatcttcatgtcttcgcccgctgctttcatctgcaggtccttcctcaccgtccggcggcagaactggtccataatcagattctgaacatcatcgctgactgtaaaatcaataaacagctttgcattgtcttcgtggggagcccccttaaccagagcgcagccgtccggcacggtactggtgccttcctccggataaatcatggagatatccgcccctttggcaatccgcttcttcgctgtctcctccagagtaattccgacaagacgaattcctgtgctgacctcatccacgacttctccggaaccggctgatacatttccatccagagcgtatacaaaatcctccatcagctcccgctcgtccatatcaagcactaaaatcatggtggccagagccgtatagctggtacccgattttccaggcgctgcaaatgcgatcttcccccgccactcgtcatccagaaaatctttccagctgtggggagccatctctccgcttaccagcttattgttataaataaacacgatgggcagctctgtgaacgcggtccatctgtcatccggagacaaataccggtcgtccagtttatcaatcagcttacaccggtatggttcaaaatactcccggtatgcatcatagctttcgaccccgccgccaaacatgatgtcgcacgtctgctgcccggcctcccccgcaatggcctccagaagttctgtagaaccgccatccctcacctcgacccagatgccggtgcgctcttcaaattccctgataatcgggccgtacacctcttctttatgggaagtgtatacaatcagctttttgtcctcgctgactccgtaaatctccgcctgctgaccggcagcggttccggctccgccttttcctgttttgctgcagccgtataaaacggcggataacaggaacaacagggccatacccttcatggccctggcagcctgtttccgccaaattcgtttttctgatctgattgcgttgtccatacatacctccccttggagaatcactttttccattataccatctcagggaaagaattccaatatggacgcacactcttattttctgtgagtctggatgctgttactgcacccaggcctgagagaaaaaggtgcggcccgcttctcagctgcagacgacggaaagcagttcttcccccagaacctcgtacgtataatcattgtttccgccatttaccgtaagacgaatcgtgttcccttcccgctccgcacaggcggtcatcacggttttgccggtcagatccgtcacagcagtctcagccttcatcccagtctccggcagatacagcaggaatctgacgccttttgcatagttgtaatccggtttttcacgattgcttccgactgctatcacactgcccggccggaccatgagaggcagggagaagtagtcatgagtctccttctgccatcctccgccagtcacggtttcaccggtcagtaagtttacccagattccttccggcaggtaatactccacctcgccggattccttaaagatcggtgcagtaagcagggaatcgcccagcatatactgtttatccagcgtctcgcaggcccggtcgcccggaaattccacaaacatcggacgcatcatcggaatcccctcctcgtgagccgtaaccgcctgcagatagagatacggcatcaacgcgcatttcagttttacaaacttccgcagcacgcggcacgcctcctcatcaaagagccacggaacacggtaggaggaggatccgtggaggcggctgtgggaactcagaaggccaaactggcaccaccttttataaatatcggccgaagccgtattctcaaaaccgctgatatcgtgactccagaatccaaagcccgcgcatgccagggaaaggccgctgcggatagtctccgccatggaagaatacgtggcggagcagtcaccgccccagtgtacaggaaactgctggcctcccacagttgcagaacgcgcaaaaaccacggcatctccggttccccgctctctctccaaaagttcaaacacggtctgattgtaaagatacgtataataattatgcatcttcaccggatcagagccgtcgtaataagcaatatcctttaccggaatccgctctccgaagtccgttttaaagcagtctgcccccatatccagaagcactttcagcttcgcctggtaccaggccgcagcgcccggattggtgaaatccaccagccccatgccagcctgccacatatccgtctgccacacgtctccattctctttttttatcagatatcccagtctcctcccctcttcaaacaagggcgatttctgtgcgatatagggattgatccacacacagatttttaagcctctgtcatggtatcgtttcagcattccttccggatccggaaatgtcttcggatcccaggtgaaattgcaccactcaaacgcctccatccagtaacagtcaaaatgaaagacgtgcaggggaatatcacggtccgccataccgtttataaacccggaggtggtcttctcatcgtaactggtcgtaaaggaggtcgtgagccacaatccgaaggaccaggcaggaggaagggccggtctgccggtcagttccgtatatttggaaatggttcctttcggactggatccgttaatcacacagtagtcaaggcgttccccttccacggagaactgtacgcgctccaccttctcgctggcaatctcataggcagcatccccttcgttttccagaaggacgccatatcctttgttggtaatgtaaaacggaatatttttatacgtaatctcgctggcagttccgccatcctcattccacatctccaaactctgtccgttttttacgaatggagtgtagcgttctcccagaccgtaaatatattcatccacgtcgatggcaagctgttctgccatgtaacatcttccggtctcccgatttgtcatatatgccatattccgaaacccggtattcgtcagttccctgtctccgtccagaaaacggattccccaggaattcggccttttatcaatcaccgcagtggtacggccgctgcggtagcgaatctcttcgtcggtttcctcaatcacggtgtgaggcggtgtaccgtaaatccgggcaaagggaccgcggatgaccgtaccgtcaaaatggctgacagacacccggatgacatcctccatcggactggtcagccgaattgtcagcatccctacattcagacagtcgccgcggtctgatatatgtttccccggcgcatatacggtaagttcatttccgttctgtctgctgtctgcgtactccactgcgtaaagcggcgtaatctctttttttatacaccagtatccttctgtaaatttcattgcgtaccctctcaaaacggcgtgccgttttccctttcattttctattattataagtaattataagcagtgaatataaatacaggaaggttgaaaatttacccacccttttcgggaaaaatatgcatattttttgccaattattgaaaaaaatactttcaaacttggccgccttatactagaatagactagatcgaatcattattctatagatgagtctacattttacaaggaggacattataatgtcacagagaacggatattcacaaagtactaattatcggttccggcccgatcatcatcggtcaggcatgcgagttcgactactccggtactcaggcctgcaaggcgcttcggaaactgggatacgaaattgtactggtcaattccaaccccgctacgatcatgacagacccggagacggcggatgtaacgtatatcgagccgctcaacgtggaacgtttagagcagattatcgcaaaggagcggcccgatgctctgcttcccaacctcggcggccagtctggcttaaatttgtgctccgagcttaataaagcaggaattctggaaaaatacaacgtgaaggtgatcggtgtacaggtggatgccatcgaacgcggcgaggaccgtgtcgaattcaagaaggccatgaatgaactcggcatcgagatggcccgcagtgaggtggcttacagcgtggacgaggcattaaaaatcgcagatcagctggggtatcctgtcgtactgcgtccggcctataccatgggcggtgcaggcggcggtctcgtatacaacagagacgagcttaagaccgtctgtgccagaggcttacaggccagcctggtaggccaggttctggtagaagaatccattctcggctgggaagagctggagctggagatcgtgcgcgacagcgaaggccgtatgatcaccgtctgctttattgaaaatatagatccgttaggcgttcatacgggagactccttctgttcggcccccatgctgaccatatctccggagtgtcagaagcgcctgcaggaacaggcttacaaaattgtggaatccgttcaggtaatcggcggcaccaacgtgcagttcgctcatgatcccgtttcggaccgcattatcgtcattgagatcaatccgcggacctcccgttcctcggcgctggcttccaaggctaccggcttccctatcgcactggtgtccgccatgctggctaccggcctgacattaaaggatatcccctgtggaaaatacggcaccctggacaaatacgttccggatggcgattatgtggtaatcaaatttgcacgctgggcgtttgaaaaattcaaaggcgtggaggacaagctgggaacccagatgcgtgccgtaggcgaagtcatgagtgtgggcaaaacctataaggaagcgttccagaaagcaatccgcagtctggagacgggacgctatggactggggcatgcaaaagatttcgacacgcgcacaaaagaacagctgctccatatgctggttaccccttccagtgagcgccatttcattatgtatgaagcgttaagaaaaggcgcctctgtggaagagattcatgagataaccaaagtgaagaactggtttatcgagcagatgaaggaactggttgaggaagaggaagcacttctgtcctgcagaggcggacttccttccgatgagatgcttaccgccgcaaaaaaagacggtttctccgataaatacttaagccagcttctccagattccggaagaaaccatacggaatcaccgcattgccatcggtgtggaagaagcatgggaagggattcacgtgagcgggactgaagacagcgcttactactactctacctataatgcgccggaccggaacccggtcagcacagagaagccgaagatcatgattctgggcggcggtcccaaccggatcggccagggtattgagttcgattactgctgtgttcacgcctctcttgcccttaaaaagctgggctttgagaccatcattgtcaactgtaatcctgagaccgtatcgaccgactacgatacctctgacaaactgtatttcgaaccgctgactctggaagatgtgctgagcatctataagaaagaacagcctgcgggtgtgatcgcccagttcggcggccagacaccgttaaatcttgcagcggatttggaaaagaacggtgtgaagattttaggaacaccgccatccgtcatcgatctcgccgaggaccgtgatttgttccgggccatgatggagaagctggagattccgatgccggaatccgggatggcagttaacgtggaagaggcgctggcaatcgcggcaaagattggttatccggtgatggttcgtccttcctacgtgctgggcggccggggaatggaggtcgtgtatgatgatgaaagcatgatcggctatatgaaagccgccgtgggagtcactcctgacaggccgattctgatcgaccgtttcttaaatcacgccatggaatgtgaggcggatgcgatcagcgacggaactcacgcatttgtgccggcagtcatggagcatatagagctggccggcgttcactccggggactccgcctgcatcattccgtccgtgcagatctctccggaaaacgtggagacaatcaaggaatatacccgtaaaattgcggaagaaatgcacgtggttggcctgatgaacatgcagtatgccattgaaaatgacagagtatacgtattggaagccaatccgcgtgcctcccgtaccgtgccgctggtatccaaggtctgcaacattcgcatggtgcctctggctaccgatatcattacggccgagctgaccggtcgtccgtcacctgtgccgtccttaaaggaacagatcattccgaactacggtgtgaaggaggcggtattcccgttcaatatgttccaggaagtagacccgatcttagggccggagatgcgttctaccggcgaagtgcttggactctcccactcctacggcgaagcgttctataaggcgcaggaggcgacacagaacaagcttccgctggagggtacggttttaatttccgtcaaccgcaaggacaaagccgaagttgtggaggtggccagaagcttccacgaggacggatttaagatcgtggccaccggaaatacctatgaactgattcacgatgccggaattcctgcgactcgcgtcaataagctttatgagggacgtcccaacattttggacatgattaccaacggccagatccagttaattgtcaactctccggtcggaaaagacagcatccatgatgacagctatttaagaaaagccgccatcaaggggaagattccttacatgaccacaatcgccgctgcaaaggcaacagccagcggtatccggtatgtaaaggaacacggcagaggagaggttcattcgcttcagtctctgcacagcgaaatcagggataaagaataaccttacctttctaatgtaagaatccaaaagcaccgataacggttgaaatcaatcgttgtcggtgcttttatgcttcggaagaattgtttcatcggaaatctgcgtgcctcgtttttccggtttcaccatgtcttccaccatggagatcagcggaaacacatcgttgtaatgcttctgtataaacattccgtttcgttcctggaacaaccgtttggccagcttgtcaacgaccggtatcacgattcgttcatgctggcacagcatgggggccacgtggtctatactgcctgtcacctgataattcaggcagccgcagtgacagttgcagcggcccatgacggcacagcccttacactcctctttttccagttcattgcgttcaaacagctccgtacgctttttctcatcgattccgcccacgacatccccgatcgagaactctctgtgctccacaaactgggtacagggatagaggaggccgtcaggggcgacggatatctgttttctccccagctcacaccgttcgtggcagtactgttttccctgaatatggctggctatcttcacctcaaaggggctaaaataaaatttctcctcccgcttcgtcagttcatagtaaaaatcagccagctcccggtactggcgtcttaattcgcgaaccgattccttcgtccaattccctgcgtaattcaggctgcagatgaagtaatgaaatcccttctgccacagttccttcaccccctgcgcatactctgccgctgtttccggtgagacggtcatcatcaccggcgcataggggcgcgtggccaggagcatgtccgtcaccccctccaggcggtcatatgtgcctgctccgccgtgatcccgtctgaagaaatcgtgagccgctctcgttccgtcgtgggacagagcgataaatatattctcttttcgggaaaactccagaaaatcccggtccagcagcgttccattggtcgtcatcttaaaatgaaaccggacaggcctttcccgttccatggccctgcagtatgccaccgtatcgcgaatcgtattgcggcacaaaagaggttcccctccaaagaatataataccgcaggaaggctctccggaagcggctgccaggcggactgcgtgttccgcggtggaacggctcatatactccggtttctgacatacgtagcagtaactgcactgcaaattacagtcattggtcaggtgcagggtcatatgcatcagattaccccctgtcctttcagccagtctatgaagtcccttacctgcgcctttaaattctcttcggcagctgcccgtgccatatcatcctgctcttctgacatggccgcccagtagtttccctctctgctttcgtacttcttctggattttatcatactcttcaatcaaatcgccgtagtcataaggatcatagaatattcctacgactacttccggagaggccttttccaggcttttttgcagccttaccgcagtatcctggatcgcatagccctctacggttgcatatactccctcttccgtctccttccagttcccgacatctgacttggacacaaactctatggcaatccttttatccggatcccagccatctgtctggagactgcctttcaccgttttttctttcgttttttctggttcggaatagatatgcgtgacgggaagctttacatttttcaactccggcgcggcctcctgtgtcagtatgaggccgccgtagctttccgcctccgcccgtatgatctcaaatgcctcctcttcagacagaaagtatggcgaaacgaccgaaacacagccgtaggccccgcttccaccgccgtgaataaagaccggagcgaccctgtccgatgctccccgggcgccttctgtgcttgcaccgcaggcgcttaaggatacagtcagacctaatgccgtcataacgtatgcgttcttttcccatctggacggtattcgtctcagcagctgcggatccgccagtatctcctcttttaccgggtatccgggatttttatatctggttaccgtttttaccttcatcgctcatcctcctctgcgggaattcgctgtgtgcttctgcatctggttactgttttctattagaaaagtataccaaattgtccggacgaaagcaacatttgcccgatgaaggaattcagtacggtacctccgacacaggaaaaagcaaggcttcttaagtcttccccaaaagcctcgctttttcctgtgtcttcaataatagaaatctgctttgacgatccccggaaggaaccatctcttctttgtatgtcagtttagcgtagcctgaatcagtttctcatggctgtgaggctccgccagttccagaacgcggtttaagtcaaggcccatggcctccgtgatccggatcccatactcttcatcggcccagtagcagtgaactgcatggcggtatttgatattcactgtgacagatgcaatatttcttgcggtattgccaatcagcagctcccgcttgtcctctggcaggattcgccataggtcaccgcctgccctgaagcagtcgtctgtgggatcgtcctgtggatcgtaggcatacatcgatccggataaatcaagcggcggttccataacctcaggctgagccgcccagtctcccatactgttgggcgaatacgcgggagcgcctccataattgccgtccgtccgcatgaggccgtctctgtggtaatcatggacttcgaccttaggccggttgaccgaaatttgattgtagttgatacccaggcggtatctctgtgcgtcgccgtatacaaacaggcggccctgcaggaacttatccggtgaaaaaccgattccgggtaccacatgggctggtgtaaaggcagactgctccacttctgcaaaataattttccggattgcggtttaactccagcactcccaccttatgaagcggaaattccctgtggcgccagatctttgtaatatcgaaaggattctcataatgattccttgcctgctcttctgtcatgatctgaacatacatggtccagcggggatattcacctttcacgatcgactcatacagatcacggccatggctttccctgtcttttgcaatcagcgcttctgcctcttcatccgtcaggtttttaattccctgctgagttataaaatggaatttacaccagaaacgctgattatctttgttgtaaaagctgaaggtgtgttctccgtaaaggttcatatggcggaaagaggcgggaattccgcggtccgacatcacgatggtcgtctgatggaacgtttccggcagcaacgtccagaaatcccagttgttctgtgcagagcgcagaccagtctggggatcgcgttttaccgcacggtttaaatccgggaaattatgcacgtcacgcagaaagaaggttggggtattattcccgaccagatcccagtttccttcttctgtatagaacttaattgctgctccgcgaatatcacgctccgcatcagctgctccccgctcccctgccacagttgaaaagcgtacaaaaacatctgtttttgtgcccttctgcagcacctttgccttcgtaaaagcggagatatcttcggtacactcaaacgttccgtaagccccccagcccttggcatgcatgcgtctttccggaatgacttctctgtcaaaatgtgctaatttctccaggagccagacatcctgcatcatgaccgggcctctcggacccgcggtcagcgaatgttcattctcagcgaccggtgctcccacttcatttgttagttttttcgcttttgtatccataagtacctccttcttatctgtaatttcattatattcctgcatctgcacaaagtcaaaatatttttgtgcatatcgcactttatcattgcgattaatcgttatatttttgtcgttatatacaaaattatcaatgattatgtttttgggatcagcacctttgccacgccatgtttccaatactccggagaagcacccgtggttccaaatgtatgccacaaaaaaacaatcgttcgtgtttgttgtacaaatacattatttgtaaaaatgtccgcctaatacggaatatttttcttgctatttgttatttcgcccattataatgtaggtaaaagatacccgaaaacagcatgtttcataatcaagtattgtaaagggggtttatatcatgcaggaacaaaccatgtgggcactgaccaaaaagaaaccggagaaaggcctctggatggaatgcgtgccggtacctgttgtcggaccgaatgatgtaaaaatcaagattcataagacagcgatctgcggtacggatgtacacatctatgagtggaatgactgggcgcagcacaccattccgattggtcttactgccggccacgaatacgtgggcgagatcgtcgaaacaggcgcaggcgtaaccggacatcaggtgggggatctggtatccggagaaggccacatcacctgtggcaaatgccggaactgtctggaaggccacaaagaaaactgccgggatgcaaagggcgtcggtgtaaaccggaacggggcgtttgcggaatatctggtgattccgtcctccaatgtgtggccctgtaatcccaatataccagaagagctctactccatcttcgatccgttcggcaacgctgcccatacggcgctctcctacgatcttctgggtgaagacgttctgatcgcgggggcggggcccatcggtattatggctgcagcgattgcaaagttctgcggagctcgccatgtggttgtcacggatttaaacgattatcgtctggagcttgctaaaaagctgggtgctacgagaaccgtcaacctgaggaaagagactctcaccaatgtgatgaaagcgatcgggatgacagagggatttgacgtgggcatggagatgtcaggaagtcccgcaggtctttccgatatgatccacaatatgaagcacggcggcaagatcgcgctgttgggattacagggacgggaaaccacggttgatttagagacggttattttcaatggtctgaatcttcgcggtatttacggcagaaaagtctgggatacctggtataagatgaccaccatggttcaggccggcctggatatttcacctatcatcacgcaccggtttgatatccgtgattacgaaaagggatttgaagctatgatatccggccagtcgggcaaagttattctggactggtcccacatcaatgataaataaaaaaggagatttaaaaatggaacgcaaaaatgatattttaagcatttatgcaaaagaagtagaggatatcaaagaagccggcttatttaagggggaagcgccgattgcttccgctcagggagcccgcgtgaagctggaggatggccgggaagtcatcaatatgtgcgccaataactatctcggtcttggcgacagccagaggctgatcgatgctgcaaagagaacttatgataacaggggatacggcatggcttccgtccgtttcatctgtggaacccaggacattcataaagaactggaagcaaagatttccaattttctcggaacggatgacaccatcctttactcctcctgcttcgatgccaacggcggcctgttcgagacgattctctcagagaatgacgcagtgatcagcgacgagttaaaccacgcctccatcattgatggagttcgtctctgcaaagccaaacgatatcgttataagaataacgacatgactgatctggaaagcaaactgaaagaggcagatgctgccggagcaagaatcaaactgatcgccaccgacggagtgttctccatggatgggatcatctgcaacttaaagggcgtctgtgatctggcagaccagtatcatgcgctggtcatggtggatgacagccatgcagtgggctttatcggaaagcacggccgcggaacggcggaatacaacggcgtggaaggccgcgtggatatcatcaccggtacgcttggcaaggctcttggcggagcgtcgggcggatacacctccggacgcagagaaatcattgatctcctgcgccagagaagccgtccatacctgttctccaataccctggctcccgcgatcgtcggcgccagcctggagctgtttgatatgctggaggagagtacaaagctgcgcgatcatctggaggaaaccaccgcatattacagaaaacagctgaccgacaatggatttgatatcattccgggaacccatccctgcgtgcctgtcatgctctacgatgaaaaactggccggagaatttgcaaaaagaatgatggcaaagggtgtctatgtcgttgccttctccttccccgttgtgccaaagggaaaggcaagaatccgcactcaggtatgtgccagccatacaaaagaagacattgactttattataaaatgtttcagggaggttcgggaagaaatgggcctcaatgaaggctgatgatccgtttacagccgtaagaataaagggagagacaggaagtgattcgaagaaatcacttcctgttccttctctcaaagaataaatacatcaccctcgatctcgatcacatcgtcaagaggaattctggtttcatccatcagaacgatcatgccttcatattcatctattttcctgatcattccattgatggaagtatagtaaccgccatcttttttatcatccggaacaaaacgggtaatcgttacggcggggtgttcccttaattttccaatcagcacgtttattttctcatttaaaatctcttttctgttttcgtccagttccaccttctgatctgtaagccgcgccgcttcatgaatggctgcgtcgtgaccggtcagggcggcaaacggtgaaaactgggccgcacggtcagcaacctccatgggaggatgcactgcagatacgtgatggggtaaatgaataatatcgtcataacggtgggggtcgttcatttgattctgcatcgatatgatacctcctgtgaaattatgccttatgcccgccaatctggtggttgcgttccacggtcattgcaccctcttccagattcattccttttaaaagagcattttttccgaatttcttttttatatccagtactgctttctgcagatgcttctcccgttccagcgcctgttcttcctgttctctctgcttctgcagaagtgtataatccgtaaacagatccatctgctcaaagcattcctgttgtgcagcgcttctttcctccaccacatggttcgctgtaatatatatcctgcggaccagcagattcttatcgatgatcctgtcaaaaagcgtcatcacggcagccatgatcaattttgtggaagatgtccgccgttcaaggtttatcgttccgtgagcatgctttggaacactgcgtccataatggtctgtagtgacaggccccttgtactttttactgatttccggttttttcaggttctctatgtcatagcctacagtcagcaccagctgatccgtcacaagtcccttatccaccagatccagtaccagctgatccgtcatctcccggacaatcagcctcgctttcccgctctcataaggacactgcagtacctgaccggagcctgtgctgtttgtctccggcttatatgcctttacgtccgccatggtacacggttcccagccccaggcatgatccatgagcagttccgcgttgatgccaaacagcttatagagcagctcctcattatggtaatccgatggctttcccagggaacatctggcaatatcgcccatggtgtataagccgttttcttccagctttctggcgtagccgcgtcccacccgccaaaaatcggtaagaggcctgtgtgtccacagaatacggcggtaggtattctcatccagctgtgcgattctcacaccattctcatccggtacgatatgcttggctacgatatccatggcaaccttacttaaatataaattcgtgccaatccccgccgtggctgtgatcccggtctcctgcagtacgtccatgatgatctttcttaccagttccggggcagaaagcctgtaggtctgaaggtagtcggtcacatccataaaaacctcatcaatggaatacacatggatatcttccggagcaatataacgcagatagatatgataaatcctcgtactgtattccatatacaatgccatgcggggcggagctgtcagatagccggcggaaagagccggattcgatctcagttcccggtcatccgctgaagagccggaaaagcggcagcccggtgccttttgctttcgttctgtatttacttcctttaccttctgaactacctcaaacaatctggcccgtccgggaatgccgtaggatttgagtgtcggggaaaccgcaagacagattgtcttattcgtccggctcgcatctgccacaacaagatttgtataaagcgggtccaggccccgttctacacattccacggaagcatagaatgactttaaatcgatagccgcataaattcgatcctgcgatttcattgacagccgcctccaatgcaaacatatgttctatatagtaatagaataccatagtttgaaaagaaaatccagtataaacaggatggaatgtaaaggaaaaacgctaaaaagcatatagtttcccttatcccagcaaacttttcaaatgtttatttatttctcccacaagcgcttcagaattatctttgaccgttctaaaagaacctttccattcgaaggatcctgctgctcactgacagcgaggaattcactgcccagtgatttctggccaagcatttgaagggcaagtcctgccatcttccatgcgctccacaattccgggtcaaaatccagggcgttgatatggttgcgcagagcaatggggtattgttccatcagcatacagacgttcccccaatgattccaggcatcacagggactgtaattggaaaatgctgacttatcagttgtatagaatcgcttcagactttcttcaaagtgtgctgctgcctgttgatagtcacccttttccagaaaaaatatccccgcaagacagtctgtatcgcttgcatataattccttttgcttcttcccgtttaaaagagcttcgatcgcttcatcaattcttccggcatcataaagacagcagccataataataattagggcgtcgctggtagtcatagacagcgccagtcacgatccggcagccagcctcaatcctctgaaaagcccgttgataatgggaaactgcctctgaattttgctgcataagctgcagtgaaaaggccgccccaaaatggccgtccggaaactgtgggtacttctctttcgcctgtaaaaacgtttcaaatgccacggtatgattttcctgctccaaatagtggtttccctgtttgattaatctggcgagttccggcggtgcatcatggtccggtttttcatcatctcaataaatttcccaaagcttcggaagaagccgcgctaatgtaacgtcatcattctcatcccatggtctgtcaatatcaggcgaataatgaattccccttctgatttcatctgacagtttctttgcttcaccctggaatgaggcctcctccatcatcctgtcaaatgcgggtcctatgacttttatgccgatagtattgattgcagtcatatggcgattcaacagttcttcgatacatcccggttcgccagtatcctgttctgcatcttcaacgcttttttgcgctttttccagagcatttagactttcctgtacatcagctgacaaatccggctggttttttaaccattctgtccattctttggatcgataccattccaatacggcagagctgcgggctgcggaaagtattttctcattttgagcgttccatttatctatccaaacgtttgcaaggaagtccgggtcagcaagcgctttatgataaatcatcctgccctgtgtgataagccaccctctgaaataggcaaagctatcgtctccgcacccctcattgataaggaacgctgctgcccacagcccattcttgtccgccaatacaaaatactcatcaaatatccacttccactgcagcaggcttgtcaaaggaagggtatgcagaaaatctgttacctgttctgccgtttcgctgctctcggcctcctttgccagttcgattattctccaaaatttttctaccgtcattgctccctcccaaacaggaggttctaatacggccggagataccgaggccaggtataccagctgatctgtatgatcaaagtcagcagcgtaaaccgtatgggcttcaccggccgcataaaaaccagtttggggatagaaccgattgtttcgctgctcaacagacatttcttttacagctaattctttgcaatcgtttaaattccagcaaaggttatctgtgagaaactcagaaagagttttgccgccgggcttccaggtgtataaatcctcgtcgctcatgtagacgggaggatccgtttgtgataagtcctccctgcaaatgcctgcagcccaaacgccctggttttctgaccagaaaaccaaaatatcaggtatgccctggaagtcagggacaccttcatatccttcctcctgccaatcatcgcgaatcatgtcataagaaaaatccaggttttcaggtggataaaccctgtttaaactaaaactcagcggcacggctccattttgtatgtagtagtctcgcagtatagccggcaatttaatatgcagccggttttcggcgtttaaaatacgatgagcggaaattccccgccgtatggttggaaaaatgcgcttcagcgcattgctgagggatagaggttcgtacatactgctgcactcctttcacttaaaacggtctgtcggcatccggtatttctgttatggaatttctgttatggagattccatcttcgtcatacatttttgtatcacttctgtaagaaccgttttccaaaactccgtcaacggcgatctgtccattcgggtaatagaacttataagggccgcttggtacaccgtcagaataactcatatcaatctgaagctgaccgttctcataatactgtctggcagacccattcaatataccgttttgataggtctgctctattgcagctgtcctgccatccggataatactgtatccacgttccgtccagctgaccgttgttatatctgccttcagccgtaattcctccggtttcaggatcaaactggcgtgtcagtccatgccgctctccattttcaaaatttgcatagtcgaccaaaataccggaaggcgtgtaaagccggaacagtccgttctgtttcccttctttccagcagcctgtttccttcacaatcccatcgtaatagaccacatcaaggccgtcaagctggccatttttataggaatacaccgacaggctctgatccgtgcgggacttcattcttccggaaaatggcttcccatcattacgccgcaccattacaccatcagaattgacgcaggcttcctcatccacagctggaaagcagcggtacagggtatagagattttgatctgccagcaggtaaagcgccagcaggaaaagtacggctttgatgccaatggacgcaatccagcccagggaacccatagaggcaaaaagccccttgttcataaccgcaattacgataaaaatagacagacctactgcaatcgccgcaatcccttttatcagacgggcatgagagccggcatccatgatctgtgccggagcttccggattatagtaaatttcaacttcatcgccgatggcatagtggtcttctgattctccttttacatctaaacgggactgaacctcacttccgcttttcgtggtgaagtttaccacttcaaaataggaataaaaaatcggttccccgataccacggtctttccccggacgcatctcgctggcaatctggatgacttctgcggtggttttgattccgtttacgcgaagattgacagcatgccaggtaacccctgccccgtacagcaagatgtaaagtgacagccatgtaaacaggagggagcctgcgaaaaataaagctgtcttttttttacttcgtttcttttgggacttaacttccaactcatttgcagtgtccggattgactgagggctgctcaggaactgtttccatgattgcagataccagttcttcaatatgcggctgccaatccctcagtgttccttccctctcccactgcacagtcagcactctggcccggtcattgattatatcggacacaaggtctgtgagaacggcaatcatttcttgtttggactcttcatccattgtgaaggagcgtacgcttctcaaggacgccggtacatcagccatctggccatactgtttaaattccaaatacagttcagccaggatcagataggtgctgtcatagtaatctgagttttggggattgtcatccataaatgaactatccaggcaaagtataaaaaggttctgcaatgtccagactggattctcctgcgcctccattttcagaacctccatcagcatccggacgctgtcattttgtgtctgcttgtagtacatcatagaatctctcctccttaagtaaccttcgaatcccttgcccgctccattttatgaatcagggcattgatttgaaactccaccatattctccgcagtttcagggaaaagaaacggcatggtatccgggattgccttgtgaaccataatcattgtcagaatcagatttccaaacagtctgggatcaaagacttgaacagaaatgccaaaaatattcataagactgcgggataaagcgatctggctctgccggaatacctgaaagttttccgggttcagacagtgatacactttttgtgcctcttctatagaaaggaccgcgatcccacttcttctgccatagcagcagcttttcagaaactcctcaacgccttcgcgccagttgagtgtcggatcgtccatcagagtctgggcataatgcagaattttaggctgctggtactgcagggcgcaaagcacaagttcctccttagaggaaaagaaactgtaaaagtaggattttgaaatacccactttcctgcatataaattctatgctgctatggataattcctctctcgttaatgcattggagcattgtgacgaaaagggcttctttgatttgctttcgttcctgttcggtatatgcttttctggacattcctctccccttcctctatatttaaaatacaaaaataaaaaatggtatttatataataaaccaaaagtatcatccatacaacaatatttgcttaaaaatcagataaatacaggtttttcccggtaacttgtttgcttcgaaagggaaagcggccgctacccaatggcagccggccgctttccagttttttgttatgttgagcgattaagttattctggctccgtctcttttcctgtccgttttttttctcccactgcctcagccacggctttctgcaattcctccatctggtagggctttgtcaggaatgcacaactcccggcctccgcgcccttctgcacggtctgtgcatcagaatgtgcggtcaggaacaccaccgggatattggccgcagcgcgcagctcccggcagaagtccagtccgtttccgtccggcaggtcgatgtccaggacaatggcatccggtgccgtctgatctaagaccgccctggcttcccccagtgtccccgcacaaaaaagggagtacccctcggggcgcaggacacgctcgtttaggtgcagcagctccggactgtcatccaccaaaaggactgtttttcccgtgtaccgtgcggcagcccctggcttttgcaggggtacatgccgctccctgagcctcgccagttcccgctgactgaccagagaacagacgaaatacgccagcacatcgaacactacagagatatgttccattttctccggcgggggattgtccgcgcctaaaaaaccgtacatcttcccctgggacagcagggggcttaaaatgatggagtggattttctggggctgcaaaaattcataaatcagcggatccctttgccgcagtgtttccactttcggttcgatgatgttttcgcctgccgtcagctgcccataccagggaagcaggtccttttttgcgacatatggcagttcttcaataccggacgagatgccgggagtacaccattcataagtattgcggatatgctgccggtccatttcctcaaatacatatacccggtcgcattccagccgttcccctaaaaaacgcaggaggcggcgcagcccttcctccgcgtccggggccgctctgattttctttaagcattccccaacaaactgctcgttgcgcgcggcactttcctgataatacagatgtgggggacagccggcgctgcctgcatggagttccatctgtggctcctcctatctttgtgcagaagttttatggaaagttttttcacacggttcattcaccagtcggttgatcagcagcagatccaaatcactttgaaatggaattgtctgcccgttcattctcacagttccctgccacgtatgattattgtattcctctatgctcacctcaaacgttactggttgattctttttcatatgccccttcctcctttgttatagaatagcaaaaaaaaacggtaaaaacgcgaaactgactaaattgtcaggttcatgtttttaccattcatatcgctgccattattttaccgggctgtcctctacaatctccaatagataaccctcattccgaaaattcatcagggaaaccttcccattagaaaccgccagtttatttttaagcctcgacatacatttccaaagggcactggaatttccggacatgggctgtttccatatctcctcatagattttcgcagccgggagggtactgccctcatgtctcagcaagtacaaaaggacgctgaactcccgtgcggtaagcagcatatcctgtccgtttaaaaacgctctgagggccacggtatccagtaccagggggtcacgcttcaatatctttgtctgctccatctcccgcctggttatctctacaaaacggagctgggccttgacacgggccacaaattcgtctacgtcgtaaggcttagtaatgtaatcattgccgccggccaccagcccctcgatgatttcactcttttcgtccagcgcagtcaggaacagcactggcgcggaagtagtgggacggattttttcgcagaaggaaagaccgctgccgtcaggcagcatgatgtccagtaccagcacatcaggcgtatgtgtctgaagcagctccctggcttcagaaagtgtgccggcacataaaacctgaaacccttctcgttccagaatccggcggttgatccgctggatatttttatcatcctctaccaggaggattattcccgtcctgttcatgctatgcctccttcaccggcaatataaaccagatctcagttcctttgccttcctcactcttaacgccgatcttaccgccgtgttcctcaatgattgccttgcagatggtaagccccagcccggagcctcctgaatctccccgctggaaccgttcaaatacgtgtggcagcagctccgggctgataccgtccccattatcggtgacactcaccagcacccggttttccagggcttttgcccggaccaggactgagccgttcctggtgtgacggttcgcgttactgagcagattaatcagcacctgcacaagctggtcggcactgccttctacgaaaggcaggcccggctctgtatctgctgtcagagtattcccctgacgtgcaaacatggactgatagatacgcaccgtctccgccaccagggaatccagggccaagagccgactcccggaatctgtcccctgcatacggccaagccccacaaggctcgtcaccatctgagccagccgcctggcctcggtggagatggcagttaaatccgtcactgtttcctcatctatcgcacccgacctgatactctgggcagcaaactgggcattgaccgagatgaccgtcagaggggttttcatctcatgggacatatcagtgtagaactggttcttcatgcggttcatctccgccagcatttccttttcagccgccatgtgcgcctcactctccctggcccgttttacctcccgcatcgtagcaaggaaaagggcagtcatagaatacaggacgaacaccgccattgccatttcagaaatagcgaagcgaagggccggcagcagataaatgtcccggtggtacagcatatcccacagcgccgcgaacaacaggaaaccaaagcccaaaagcacggcaagctgcccggtctctggccgctgccagcgaaggagaagccgggcaaagaagaacagtccgatcactcccaatatcgcgacgcgccataccattgtgtgggatatcagcagggtggaaccgaatagatccacggcagcaaatcccccgcacaaaaaactggcagcaggaggaaaccattttggcagtacgccgggaaaaagaaggtataaaagccacaccagcaggatcccgctgatcggcattgttaagtactccagacggaacatcaccgtccacggcagacccggaaccatcacctccagcatgcgctggccggtgactccagtacggataaaccaggtcagacagaataaggcaaacaacagattcggcctgtatccccgcatcagcagatagaggatcagatggactgcaaacagcaccagatagccgcccataagcaccgcttccggccagagatcccggaaaacgtattgattcatctgttctggagggcctataaaaaaagagccataggtgccgccgtccttgtgagtgaagttagccgcctgctggacaatgaccagctcgccatttgcgtcaggagacaccggaagcagatagaattttactccgggtgtggtagtctcccggctgttccccggaattcctgcttcaaaaatcaattcaccgttcacatacatgcggctggcaaagtccacgctgtagccacagataaggtaactgccctgagggactgtcagatgcattcggctggtggcatactgggtttcacttcccggctgacccacatgaatgtccggacgctctgaaaactcttgcggagtcagaagggcatctgctacatactccacagcaccggtaagcctcacagccttctgcctgataccggtctcagataaatcccaaaatccatttgccgaggtttcgattatcatttcatcggtacggggcttggctccccacactgccagcagcatgattacaatcagcggtaaaacagcggcaagtatccatctttcttttttctctgacatttcaccgcccccctgctatcgtttggaattgattataccagaaaattacagggatataaactaatttcggcctgtgatccctggaaattccagttttccctcgtttatggcatagatatgggtgcaaagcgtttccagatcatcgtaattgtgggaggtcattaaaatggtccgtccctctgcctggaggattcggatgatatcttttgtgtcattataggtcttataatcgagggcgttaaacggctcatccaaaatcaggatatcctgatcttccattatggcctgtgcgatgcccagtttttgtttcatgcccatggagtaatgttctacctttgttttatcctccgggtcgagcccggtcttttgcatggcagaacgaatttctttttcacctgccacgccgcggatccccgccagataccgcaaattctgcaatccggtattgagaccgatgaaaccgggggagtttatcagcactcccacgttttccggaaaatcgcggccctttcccagagcctgccctctcacataaacctgtccgctgtccggggtcagaaagccgcagataatattgaacaggaccgactttccgctcccattggctccaacgatgccaacagtgctccctttttcgacatccagggagacatcagacagaactcgccgtccggaaaaacttttgctcacttgatctaaagaaataataggtttcatatgttacctccttcatgattaaacagccgcctgatgccccggatggaaagccagaggatcaggggcagggaaagggccgccagtaatacagccgcggctgcggccgggatggttcctcctgtctgcggaagcttcagccgcgccagactggaaatccctgccgggagccacgaaatgggcaacagacaaaggaaatgcagcagcagaacggccgcaaatcctgccgtcacctgccccgtcacacagaggacggacaggattattaagaattgaaatgcaatatccaaaagtttcagccctactacggctgcagtcaggcccatatccggagaaaatccctgcagaagcggagggataacagccgcaagagccagcagccagccatacagaaaaatccagagaaacccggtagaaagaagcgcctccagaagttcagttctccgccgcagacggactgtcaaaaaaacagaacgttcccccacggcctgactgcagaatacccccaggggccacagaggaagtatatccatagtcagcagcatgaaaagccccatcggataaaaatatccggtgccatgtcctgcaaacaggcggaccagccaatctgtgccctcttccggcgctcctccggaaatccaggtccagaccgtcataaggagaatcaggccaatcagaagcaacccattttttccggtaaacaggatcctgcggtaacaggaggccagccccttcccaccgtgcttaaaagccgaatgccgccactgccatctttgggtgacgagccacaccattcctgccgccagacccgccgtagtcacagcagtcagcggaaagcgccaggggcaggccagattgtgaagcagaaaaacccaatgattgaatccggttaaaaatacaaaaggcggacgggacataaccggcagctggatccagagtaccgcgaacaaatacagcgccatgagcagtctgactgccagggagcggctgcaaaaatggcccagacaaagggctgtcagcgcaatcagaccgtaccccagaagcgtttgtccggcacagcaaaggattgcggaccacggcgatggaaagattccctgcagcagcgtaaatacctcccgccactggcctcccgacgttcccggccatcttccggcgatgggaagccccagaccggtgagcagaatcgcagccatctgcccaagccacaacaatgctgcaatcattaacagcgcccgatatttgtgaaaaaagtaccgcccaaaggtcccgtaccgcaccagcacgaaaggcgtgtcatcctccatcacactggtacagagaagcaggaaaacaggcagcacagcgaaagtgtaatagtattggtcgttcaggactgccagtaaatgaaccggaagggtgtcttgtgtactcaccctctcactcagcccaaacagaagggataagacaaaaagcaggaaaaatttacccaggccggccttctcccatacacggcgcaccataggatcacacctgataaatggtgcgtttcttcactttctgaaaatagagcgccaccaatcccatcacaatacacatcagcaccggtcccgctgtaaatgaagctgcatgaactgccgcagcgcttaggctggcaggttcaaacgctgtcacaaagcgcagtcccggcaggccgaggattgcccaaaagaaattctccaaaataacatagataaacggacctgtcagaattacgaacacattgctgccataaagagccagcacaaaaccaaaggtcatggtcaggatgcccagcagccccttccacagagaaagcaataatgcatagagaaccggcattttggcataaaggttcgagaatacgtgggcatagcctgtggggatcggccaaagcgcctgtggctccctgatatacagggcaaacagggcggagatgaaacaggggatcaccagaatgataaatgcggataccgcacacgcacaccactttatgaccaaataacgctgcctgccgatgcgggtcagggtgtaggtcagaaaacggtcccggcgctcatagtaaagctgccagcaaatcgggatggtaacaaacagtggaaacaaaaggcttaaaaactccgtaccgatttcccatgcgtcaagttcaaaatggagggtatacccccgatacagggtgcaggaaagaatacaggtcagcagtgtaagaagacacgttgtgacaaggaccggtttggctattttctttccctctaatataaagtttcgcatatcagcacttccttccggttgatttttatttgcacctttatcttagcatctgcctccggaaaaacaaggcctagggaacaaacaggggttttacgggaacgaaacggtccgcccataaaccccctgctcttctatgcttcaattttcaggaaaccaatactccaatggtgatataaggaattccattcagccggtcgttgccggtaataatctttccccccatgacgttccacgatctgtcggacattatacaggccataaccatgcccggcttccccttttgttgaccagccccgccggaacatctgaataaactccatattagtcagagccgcatggggattcaaaatcgagtaggagggagtgattaactcccgtcctctcacaccaccgtgcataccgttcggtacacggcggtttcaacagttgacgtgcacggactgataggctgtggctaaatcataatagccactgtttatcagtctttcttttgtcattgccatatttaccgctaccgtttgtgtggtaaaccaatagcctcttcggctgttccctgccttccatgccaattctttcggcactcccattttcagcaggttcttcaccttcgttttcggtttcttccattgtttccatatacacattcggattctgtgatatagccattggttcagtccctctattcggttcttcatatctgctactccataataattcagccagccccgcatatacacctttatcttttctaacgatgggcgtatgctctgaacagaccttcgggaactaaggtctttcagttttgacttcattttcttccatgacttcccatgaacccggacataaatgccctttccgttctttcccaatgtgaagccaaggaacttaaaatttcggattgcaaatacacttactacacggcttttcttctggttcacctgcaatttcagcgtcccttccagatatttcgtgcttgtttccagaagtctctttgcggctctctcacttttagctaacaatactatatcatctgcgtaacgtacaaaagccactccccgtttctcgtactcctggtcgaactcgttcagatagacatttgccagcagcggggatagatttcctccttgcggcgatccttcctctgtctccatgactataccgttttccatgacaccactctttaggtatctctttatccattggataaccctttcgtcctttacatctctgcgcaggatatttaatagcatttcttggttcagagtatcaaagtatttcgacaggtccaatgcaacggcatgggtgtatccctgttctgcatactcttttacctttaaaatggcgtccctggcgcttcttcccggccgatacccatagctgttctccgagaacagcgcctcatagactggcattaactgctgtcctatggcttgctggaagatacggtctttcacggttggaatgcccaactttcgcactcctctctctggcttgggaatctctactcgtcttactgggtcgggggtgtattttccccttttgattctctctatcagttccttttgattttccctcaggtagtcacctgtttcctctacggtcattccgtcgattcccggcgctcccttattcgcctttactctcttaaaagctctgtttaagttgtccttattcagtatcttctctaagagttccggctgtgcactgtctctttccttccatatccggcggaaagaacggtgcgctctcacatacccttcacgttccgcgctgtctctttgtgagcagctatctttgttttctgtacccaatgttctttcctcctttcccggttgtactaaagactcctgttgattcggtccttcatctctcgactactacgacctcggctgacttctgtacgttcagcactatctcacgatagtggttatccctttcaggacattccgcacagacctccccgggtaccacacgtttctttctctccatctatctgccacatttaccatacatgattctgtgtagttattgggctttgacttgttgtgcagtcttaccctcatgtatagcctgatgtgatttctgttcgtcagaccagagatttgcccatgggttagtatgttccccatatccagcttccttcagattccacctcacgatggacacccttgccttcggctatatccttcccaccaccgggcggattccggacttgcaccggttagaaacatgcgccgccgggcgcacacagaaaaccggaggctgtccccttcctcgatggctctggcatacagcacgtctccgggtgcggcagcctcgatggcattgtccagcaaaatggcaatcacctccacccagtcggcctcagataaaacgcggcggagaaatgcacctgcaatcgtcacttccacacggacctgtttgaattccgcctgcttcatttttccaaacagcagtccgctgatcactttactgtcacattttaataattctttatccgcgccatccagtcttacatgctgaagcagagctgtcactgcctcctgcgcctcctgtaaatcccgggcagtagaaaccgctgctgcaaccgccatcatctggttgttaaagtcatgctgacgcgcccgcacctgttcaatcagttcctctaccaaaggaagatactgttccaacagcgcggttctccgcctggcctgcacacggtgctgccgaaggagcatggcaatcacgtcgccaaccgccagcagccccaccgctcccaccgtcaccggaagccagcgaatcatgacagaaaagtcaaactgaaacaggatgagcatcagcaaaagcagaagctccgtattgctgcacacgatacaaatgacagggtctccatccgccagcttctccctcagccaccggagtgcccccgttccccaaagcgccagccagaggcccagggacagcacccggcccacatagagataccaaacgggttccgccgaaccgcacagggccaggaacaataagcagagttccctcagcaggagatacagcgcaaaggcggcaaccgtgccgaaaagcgtatgtccctcactcttttgaaaccacaaactgtttaataacagcacgccaaggaaaaaaaacagaaacgatacgatttgatccaccgggagtaccgcatatgccatctctgtatcgtggtccccaagccccagccgggagagcaggcagatgccggcgaacaccagcggaagcagccagtccagctttccccttgaccggcccagcagtccgaggctggaaagagacaggagaagcccgtctaatacactctgcgaaatgatggaaattgtcatggctgttcacgctcaaacactgctttctgatatttctcaccaatcgggactgctgttttgcacccctttaggtaaagcaggcggtttgccttgtctattttactaatatgaaccggattcaccaaatagctcttatgacactgcagcagacggttctgcggcaccatgttcagcagctttgacagactgtaaccagaaatctggtctgctatttcgcagtcaccgtattgttcggaatgaatgacaagctttttgccaaaggattcaatataaaggatatttctgatttcatattcaaacagaaactgtttctgctcaatccgaaggatttccggagctttctgcatctgtgcccccatctcgagagccgcttgaaatgttttttgaaattcagcctccgtgaagggctttaccaggaaatcgtagcatttgatttcccggtaggcagataactcctctcctgccagttccgtggtaaaaagaattggcgtaaaccgatattccggcatggaacgcagctgccttgccagttcggtcccccggtaatccaaaagctgtatatccagaataaacagatcaaccttgtttttcaccgcatagaaaagagcctctgcggccttctcaaatactgcaagtttatgttccattgagctgttttccatgtaccggcgcatgagcgcaactgcgcccggctcgtcttcaaccaataaaataagtcccataggcggcctccctccacatgttctgccaaatatttcaataataaccgtattctatcatataccagcaaatccgtctatctcataatcctgacctcgccaatctcaggtttggtcttccaacagccataatagcgtatatttttctgccacgctgctgttaaaccttcatccgttttgaccagttatttacagcaaatggcatacagaccattccaattaaaaccggaaccgtaataagtaaatagggcgaccagatcactttaccaaaaacagaaaaggtattggttctgaaaatgtcggcagagtttcttttgttctgctaaaaataatcccattctaatgccccttgcctctgtcgaaaaataatataagtaaagatcctccaacgctgccccacacggggccgcattttcaccgggcatatcgtctgaaataatacgcagtacgatttttttccttcatgacgaaaatttgaaacaattgcttttctgttgataaaggtccataaataaaagtatagtgatgcacaccaggtttgctgatctggccaggaccagcttcgccagcatgatctgagcgccggatgctctcgttaccgcttccatctcactcatgccatagtactggcctttgaagatcaccggcacgaaagccaaaacaaatagcgggataaagagggggatacattgggggatatctgacagattggaaataaaaaggactgtgaaaatatcgagttgaattaactccatattttcacagtccccttctattcttctatacagatagttattgagggatccgtatccctcatccgctgccggatttatcaatgttaatgttatgaactgccttacctttcggtcgaaataaacgtgggaaaggtatcagagctgccgatacgctgcatcgtatttgtattttagaaacaaactatccagcatttacagtacctagagggttcaaatgtaggaataatcgagaaataaacgacacccacacaaacttaaccacctctatctactgttcaaaaccgtcttcaatcacatcgcccgtagaatccaaaagaaccgagttgcgggctttgcgatagatggtttgtccctgaattgttttaccggaactgtctttgattgggtttccgcttgagtcttcgatgttatctaagaacacgaactcgttaggatatcctgcgaaagccgttccggtaataattgtaccatctgctttgtgtgctgtatagcccttcaacaaagcttcttccgtaacagtatcgccggtaaggtcgatcaaaactttattgccgaatacgactttattcgcagccatttgacaaaacctccttatccgatcgtaacagtcttccctccggcagagttgtcggtttctacatacgggattgccttaactgtaacctgagataagcagttgtactcttcatccggcataatcgtctgagcttctttggacggtgttacctccttgctctgtggcttcatatcctcagaaccagacatagcaccttcaacgccaagaatcgtcacaccctcacgaatgttagtagcaataagctttgcctgttcagtggcatcaatagacaccttaccagaaccgtcatgatagccttgcggtactgtatattctccagcaaccgttgagatggtacccttgacagcgccgttgttcttcatagtacctgtaagcttacttccacgggcgtgcgcagtctttcctacgagaatctctgcgacagccgcagtatcctcggaagtatcgctgtcgaatgtacatgtacctgtgatctttgcaccgctcttatcatgagcagtaatacctttgaggatcttatctgcactgacggaatcgccagtaagatcgataaggacatccccccccgtaaatgactttgtttacattcagatttgccataatgtttagtcctccatgacgctttcgttatttttctttatcagcagtcttgttgtactgggatgtactgattccaaggataacaccaaggaaagtatcaaccgcagtgatggttccgactacctgctctccatacgggagaccccagattccagccagtgcaaaatataatgtaccagcagccggaagcagatacatagcaatccacttaaggatgtcgtatgtcttgttactcatgctcattgtgctcttcctccttctctataaatttatgaatcgggagtttgtccacctcctgcataattcgctttgctgaaccattcccgcccatacgttcgtagggttcatagagatacactctcagattctcatattcatcctgggttacacacccacggtcaatatacgacattccaagatacatgatcctgtcatgtgccaatccaataagcatctctgtttttacatctttttgctcgcttttcttttgcaaataggcccacagcccagaagatgcaagaactgagctaaagatcgtaagtacaacctgaaaccatggttccatcgttttcctccttctttatgtgcaatcatgcagacctatcagaaacaatcagcttcttgttgactattgtgatttccttactaaataggtcttcgtaaagctgtattaaattctttcgttgttctctggataagagtttataatgtcctcccatccaaccgcgaaacatattttcgacattgtcgtaatccgcttcttcattttcaaccttaacggcaagtttcttgagttttctacgcattgcggtaactcgatccgggtttattcgtttgatgactttacctgtatccgtaagtgtgtacttgatttgcaagaatttgtatttgctcgaaatcttaacgattctggttttcttacgattgatatggattccaagttcagctgctattttacagacgttttcgagcaagttttcaagttcttctttactgggattcatgatgtaccaatcgtccatataccttccataaaatttctgctgacgcacatacttgacgtaattgtcaatcggatatggataataaattccaatgacttgtgaaagttgatccccaatattgacggacttctccatccacttttcgccagtgagcttctcttttggaatattccgatactccagtttattgaaagtatcgatcatacaagtctcgtattcctcgtcagacatatacgaaatatcgatctggaaacctttaaatatcaacgttaaaagccagtcaataaactcatcgtcattgaacagcttcaacaattctcgtttagcaatctcatggataatattgtcatagaactttgaaaagtcaccgaatagaatataaccgtcatttccgtataattggtagtatttgtggagatggatttcgaatcgttttctctgttgtgaaattccgcgccccttgatagatgcgcagttatcataaatgatatgttttctaacttctggaagtaaaacctcatcgcacagagaatgtcggacaatgcgatcgcggatttgaatgcttgtaataggtcttattcggcctctttcgtgcagctcgaattcctgtgtcggtccattttgaagtgtccgatttattagatcatcttggatttcaaatatataccgcaggaaattcatcatgaatttttgcgtcgattctttccacttgctgcttttcacagagaccttataagccctatacaagttattggcgtcacagacaatctcctcgtagttcataacctattcaccgttataacaatacttaccgtagtaaattgtattaggctttattatttatccttgcggaacggatagcatctccttcttcgttggttaatcgaagaatccggacgaactccattagagttcgaagcgttgttgtagttcgtattgccattgttgttcacattggcaaagttagccgaagaaacgacgcaattttttagatgttaccctttttctaaccgcgacttaatcgccatgtctctttgacgccacctttttatcaatccgatttctcggtcgatagctttaacataccggttgtacacattcagatctacatcgaatatttcaacaacccgctgcaactcgttgatgagctgctcgcaatttacaatggccgcattctggtaatctctcctggtctcgtactcgtgcattgtccgtgggtaaatggtgtttgccgctctaacattgctcgttatcagggaagcacactggtttactttcgatttgaaactccgcatcagttccctgtacttagcaaagttttcttccgaaatttctccatacgcatacttcttccgaacaaagccgtccacatccttaacaccaaatcccctctgcataaggagtatcagcatatcatgcaactcgatcgagtacgtaatcgcttcgaattttgactcttttctgtcgcctaacagaacgctcattcgtaatctttaccggtgatctcagcgaactcctctttggtgatccagcccatcttcaccgcattacgaactctggtctcattccacattttcatgctgtaccaaagctttactttactgtaattcttgctatgttccatggtgatcctccttcttaaagctctacattggacatcatcgcaatgtaggcgatgtcagactgcattttggttctggtaaactcctcctcagaaatatctctaaggacaaaccagtattcgccaggaacctgctcaacgatctgaaccagctccatgttcggatgaacagtctcggttgttccgtcgctgatagtaaccggagagcagttatctgcaaatacagattcctcgattttttctgtagaaatgaaattgtttccgttcagcttaagattggaaatctcagttccattaccgagaataattttatagattttctcttccatgattagaagctcctttcaaaaatataaacggggcacaaggccccgcgattttaattaaccaaccgggaagaccggacgaactccaagagaggccgaagcgccggcgtaggccggatcgccattgccgcccacaaaggcaaagccagccgaagaaacgacgtctcttaaccactggttgtaagatctgtttacgatgaatctcggacataccatgaacaacgccagctgagtcttgctgattgtgtagatactcggaactgttgaaccatcagaagttggactgaaatgaggatggccatacatcataggttcgttcgggagctcaatgctggaatcgaaccatgctccacctgacggtcttccatttgcaaccgcattgcacaggtattctctgtgagtaagaacagacccctggaaagccgcatttacgattgttttggcgtttgccaagttactcttgtacatcgcagagcccacatatccaccggtcgtaacattggtagtattcatctgcgcattgtaaagcgcctcatccggcatgataacgagatgatgactggtaaatgcagtatcaccgcagttgtaccagtaatccatatcaacgatacgccaaatacgacctccgatactccaatagtcgccaaggaacattcctttaaaggaaccgtccttaatagcagctttctgtactgcggtcagcgctgtaccaagattcttgcctctgaagagtacccggcgaagctccaccggagcaaagccatcaagcatagcaaagagtgcgtcttcagctgcaatagccttgtttccgtccgtagtcccgacgagtaatttgttaccggataccagctcgttgatctgggtgagttcggaaagatttactcctccgataaaatctttggaacttaaaagaccgattaacgcctttgctaaagcatctgccgcaatagtctttgtcccgttaggtccgtcaagcaggaaaatattacttgctgctaacgcctggaccttttcgtagtctgtgattttcatttaatgaatcctcctttatttgatgacaaaaatagcccgaccttcgataacatcgccattgctgtcacggagaagatcactggaatatgtacgtccaatgaccgtatccaaattgctgtcagtaatgggtgcgtccgaagaatcgagcacgtctccgtaagtacggtatccattgtcataaagcttctgatataccgtgtattcgttttcaaggttggaactgaactggttaagaatatctacctgctcctgcaattccagcagcttcttagcaaggcttgccgccgtattgccatctaacagtgcctgtaactgatcaaaccattctcgaaattctgtttctgacttctgtttccagtcagccatttccgcagtattgatgcttgtgtattcgttgaaccacgcctcccatttttctttccaataggtacttgtggcttccatatctgctgtatgctccgagtaccaaaggttccactgagcttcccatgtcaaatatgcagactgaatctcctcagtctgtgccagaaaccaggtagaccactgctctttccaaaacttatttgtttcttccatatcagtagtctgcttttcgtagaactctttccactggtcctgccattgagcaatcaaatcatcgatttcgaccttgtccaatggagccgttacgaatggacactctgaagttccaacgcagttcgtgatgtttgcctgtcgaatagaagtaactccggcgccgacataaatatacgccagcggatattgccagcgatcatttgtcttcaccatcgtaggtttcgttggattcgatgctggggttcctttaatgattttgatgtcatttgctctgacggcctctctcgaatccacttcaagcacaactgcatcatatcggttcagcagaatctcggactgtggaactactaacggtaacagagcgtcattcagcgtccaagtgtgattgaaccaggctcgtccgacaccaacgttgataatcattgcttccgattcttttacaaccattgcagttccgacatgctgcaatattccgtcctgaatgattccatcgaaaatgctggacatctgaatagcatcgtagcgccgatctccttcttttgaattataaaatccaaatgttacactcacttcttcatcacgctccttcctgttctatagtcttaaaagtcggatagacggaataaccgtctttatcttctgaacgaacaatttcaagaatacgagcttttgtctcatgtccgtattcgttcgcaatctgtacaatgtccccgttaaagaaatcttttccatactggaacatgatagttgtttctgtttctccctcgaatgaggtaatgctcacattttcagcaagcttttcttttcctctttgctgcaactgtgccatatactcggcatcggtcaacgcatcatcgcttccaacatttgaagaaatgtcacgagcgtccgtaaacaattctctgcgattcaaaccagagccaccaccaaccgtagtatatcttcgatcggcgccctcaccttctccaccaaccaaggtcactgtcttcaacgaagctttagattcgatgtagttactattgatgatgttctcgaatttcggtgaaaatataacgtagggattccccgtctgatcgtatgatctatctgaaccggcatacaactcaaatacgaactgcttttcatcattcagagtgatcttgaaaccgataccctgctcctcgcaaattttctggatgacatcatacaggttatctcccgtgtactgagcttccagtttcaactttgtaattgctggatcggttgattctttgaaaataaagtttggaatttttcgattgctgtctgacggagaaattacattctcgttgagcagtgtttttattccattttgaagatttccgcttaatagtttctgtccccagacgattcgcctgtcgaggatagattctaatgaacgcccagtaaccgttacatggttaccgtcttcggtatctgaagtaatctggattttctccacgatcatcacatgttcagattccttgctctgcaaatagtaatcctgtttgatgtagtcaagaagaccctctcgcattgcttcatacagttcaaagtcaccgtaagcgtaataccgatctgtccagatgaaggactcgtacgtatccacaatagagacagcatctaggttggtgtttaaaattgtcacatccatagtgcttataccccctcgtagactatacggttctcaatcttaaactgtaaatttgtacttccatactcagcagtataagcaaagatgttgtcgcccttcgcaagctggaaccaatcagcgtttttatccaggcagttcaagatgtttgtagtctttccgttcctaagaagcgtaatcgacttgtttccttttacggtgcagataatgatttcatcacctgctataattccagagccagtgaatttctccaatttatcggtatcgatccgcatcacttcacgagtaccggtattgtagatcgtaatattgctggcttcaccgattgcgtgaatcgtaatagtcactccgatttcagcgtcgccattatatacaaccacctgctctgtttcatttttgatttctcccatttctagtaacgggtccttaagagattcattaccgaaaggaaactcgaacagtgcctctacaccatagaagatggttgtgttgattccgtcttttccggcagagtaaaagaaaggattcggacacacgattgagatatccgaaccctcgtctttactgaagattgttgggtcgtttgattcgacatacccttcaatctctgcctgcctattattggtttcgataagcattgtgagcttctttttaataggaaaatacttgtatgaaagctgtcttacgtcttcgatggaatccttccacatatacgcaagagaaataacaatgtttcggctcggcatccttgaagaattgaacagacttccatcgtttgtagcgatttccgtcgtattgatgttcgcttttcctggtcccaagccagttacagacttgatgatgaaaccggattcctccggtctcgccaaatcaagtcggatactatcgccaagatagttcgtaaacgtgactgctcgaatcaagtttccaccatcctttccatcgccgagaactgattcttcgtctgccgataaatctctgttctcgacagtgccttaggcgaatagttattctgtgtaaagttataagagttacctgtattcggattagtatcttcattttgaagattccgtccacgagctgctgcaattcctgtgctgacggttaaagcctgcgatctactgaacagcgtattcagtcgatgactcttctcttcaacgtctgacagatccagaatcggtcgaatcgtaggctgaccatcaacaccgttgtcgatcatatccttaacctttgcgattgcatttccgagacctgtttttgccgaatcagccatttcagcactggcattatatgccttcaccgcataagttccgatggcattaacgaatcccaatccaaagaaatcaccgatgtggtatcctactctggaaggtgaatgctcgtccagttcgtcttctgctgcttctgccgcagcccttgccattgctctggctttagcttccgcgcggtacgtattctcactgattccatcagcaaatccctccaccaagtaagcaccagcctgtttaaactgatcatgataatcccggatagctgttacagaagcattaagattgccagtgaaagctgtttttacttcttcggctttttccttaacaccagcgatgaacttaatcatgcactgcattcctgcattttgaaattccggatacttgtttgcgatagctgtaaggcatgaacttaagatgtttacaaacgcatttctggtttcgtaatctttcgatttaactccagcaataagcttgatcatgaggttcgcacccgcagtattgaactgagtctgcttattattgattgcagtgatgcaaccgctaataatgttggtaattgcagttttggtatttccgtcctgagatttaattccgctgataaattttgtcatcaacgtagagccagcagtattgaactgggtttgatagttcgtaagagtcgtaagtacagcctgcatcatggtcgtaaacgtagatgtcagattacctttctgagcattagccgcattgatgaatgtcgtcagcatagaggtcgcggcggatgtcactcttccgctcgcatctgtaaacgcattgatgaaaccgtcgataccgttgtttccaagctgaatcagtgctgtgctaaaaccactcataccactcgtatctaattcagccattcctttagccatttcaacaagtcgattcacctgggtaatcacacttgacatgattccggtatcgattccagaaatagaatccgaataactcttaattccacttccgaactgaaccagactatcaccaaaactatcaagatcgttgtcaccggtaaaccagcttacaagtcctccggtatttggaatggtgttggcaagctccactagggctttaccagctgttgctgagttcgtaatagccgcggagtccatacccataatagcttcagaatatgccttcatagcttcaccgaacggtacaagtttctcaccgaaagtatcaacatcgttgtttccagtaaagaatgctacaacgccacctgtattgggaacagtatcagcaagctcgactaaagccttgcccgccgttgcagaattgacgattgcatcggcttccagtccacgaaccgcatcgccaaatgctttcattgcttcgccaaatggtacaagctgttttccaaactcacccatatcgttttcaccagcaaagaatcctacgacaccaccagaatttggaatggttgttgccatctctgccatggccttgccagcgattgccgcttctgtaacggcatttgcatcgagtccagtaattgcatccccgaactgtctcatagcttcgccaaatggtacaagctgctttccaaaggcagtcatgtcattttctcctgcgaagaaagacactaatcctcctgtatttggaattgtggttgccatttcagctaatgctttgccagctgtcgccgcatttgccacgatttccccgtccatgtttccgatagctaacgagaaatctctcatagcttcgccaaacggtacaagttcctctccgaacttagataaagacgatcctcctgtaagccaagaagtcaatccctgtaaaatatcagccgctgtcagaataagcacagtctcggctaatgcctttactccgtccatcatagatggctgaatctgactagctccctgtaaaaacggctgaacattattcataaaagcggataaatcagctccaatttgcgggaactgactcgacacaccgctcataaatccgccgacgattccaccaacgaactgaccgattgccgttccgattccatgtaaaagctttccaccttctccgataagccaagaaagtcctggaagtttcgataagagtccgacggccgcaagcactaacgccatctcagcaacaaccgcgcccataccaaggattccaaccattgctcctggaacaagcgatgctgttgcactaagagcaagcataatagctgataacagaccgattccggcaattccttttagcaaagctccagtatcgattcctctcagtgcatcgacgataccagcgaaaaatgctacgagtacatcgacaccagctttaatcagtgacggcagattactagcaataccctctaaaattccaataaggaatttgaaagctagatctacaatttgaggcgtataagtaaccagagccgctaatacaccaaccactaattgtaaagctccgtctgccagctgcggtacacaggatacgaaaacatcgattagcgttaaaacaactgcctttacagcttcaccaatagctggtgctccggcagcaataactttgcagattgcgataattccttctccgacttttgtaagaacagccggaattaagccagcgataccagtaacgataactgtcagtgctgctacgattgcagtcgctccagcggcaccagcagttgccagcgctgtgaatccgatagcaagtgccgaaagtcctgtgccagctgcaagtaaacccgctccgattgtaagaaccccaacaccaatcaatgcaaacgctcccgataatgccagaatagtcggaaccaatggtgtaagtaccgcgcctgctacgccgataattgtgaatgctccggcaatagaaataagtcctttcgcaatcgcttcccacgataacgctcccaaaatactgagtaccggcgcaagaacagctaaggctccggacgcaaccaacaatgctgctgatccaccaagcgtacctttcatgaaattgagactgatagccaactcggctaaagccccacccatgacggtaagacctctaccgatctcttcccactgcatacctccgaatttactcatacagtttgcaatgatttcaagtgcgccgccgacgataacgagcccagttccaataccgatcatgttcttcggcatcagattaacagcaatagctacctctgcaagtgcgccgcccatagcagttaaacctatgccgatttcatcccactgtaattgaccaaaatcttttacagcggaagcaaagattttcattgcagcgccaatagcaattaaggctacgccagtagacattacgtgttttgcatttccagccaaattcgtaaagacagcaagttcggcaagtaatccaccgattccagctaatccttttccaatctcgctccactccatctgaccaaagtctttgcaagcggacgccaaaaccttcattgctgccgacagaataacgattccagttgcagtgctgatcattttcccgttgaattttgcaactctaaggaatacagcaatctcagcaaataatactcctactcctgttaatccacgtccgagttcatcccattgtaatcttgataaatccttacatgccgacgccaggattttgatagccactccaaatatgattaagctggtggcacctttcataacctgcttctgaccacttgccatggctttggatgatgcaacaacaatagccgtaagaccagcaattccaaccaagcctctcgcaagttcgccccaatcaaggtctgaaactttcttcaaagctcctgccagaatagataccgcaactgacatggcaatcatcgctgtgcatgctttggatacttttccagtatcactactgattttattgaaaatcgccatcgctccaagtaaattagcaaagagtacagtaattgctccaagagaagctgacagtttatcactatcgatcagggaaattgcaacgatagaacctgcaagcaaagcgattgctgcaccaattttaagtagcgttccagctttaagatttgtctgatatgcctcaaagcagcctctgaccccgtcaagaattccagttactccttcgagaacgccatttaacccctcaagaggttcggttacactctttaagaatttagaaactgataaagcaattccaccgacagcaatgctgttaagaatgtcaagaactccgctgaaatctgcatttccaagtttctcggcaagtgttcccatcatagtcccgactgcatcggcaataccgccagcaattacctttacagctgtccacaatgcttccatgactttgagaaatttacatttttccagtgcttctcccatcatctcaaaagcaacaatgactccgctcttcatttttccagcaccatcaccaatctgagccatgcgattatgtactcgttcaaggaatgagtggaataattcaaatccatggaaatcgaacttctcccctgcggcttttccaaattcttttactttttctccggcagttttaacaaacgtaataactgtctttacgatatcaacaacagtcgaaactgctttaccaaagatatctgtcttctttacagtttcatcaagcttaacgagatactcaccgaagcttccggtaagtgataacaccccgtttccagccggtaagaaaagaccaatcaattcaccaataccaccagcaacagctttgaaagcttgtccgacgatatcaagcactgcaaatacgcccttaaacgtattctttagattctttgaactctcttcccccattttgaattttgctgtcagatcacggatacgttctgtgatttcggctaactgttttccagtcattggcggaaagatttcgttaaatgcctcccgaacaggcttagcaacgctaaccagtccctcgaaaacattctttactgcttcgatcatcatggttcgaccaccaaggtctttccaatcctgaagcattttatttcttgcatcggcagaagcattgattacggcgctgaacgtatcactaacttccgtaagtaattccttcgcctcttcaaagtcgccgacgataatttcccagctttgtgtccatccggactgggcagcctctttcaatgtgtcgaataactgggtaaaagtttttacttttgtcgcagcatcattcgcggtcttacccatctccatgatggatttgatctgatcatcggtgtatcccatggttcgaagctgatcttcgttgagatcgcctgtaaattttgccaaagtttcagtcaagatgtcagaggtaagccatcctttactaagggtctctctgaatgagccctcatctttgatcatctcatcaatggcaattccatgaactttagccgtttctttcagcgcatcctggaatacctgaccacccataccagcgtttactactgagttccagtcctgtaattttactgttcctgccgctaatgcttgtgaaagctgatacatagcggtacttgcctgctgagagttggaacctgatacggctgcaaggttcgcaatacccttgatagcggctacagatgtgtccaaatctacgccagccgcagtgaacgtaccaatgttacgggtcatttccgtaaaattgtaaatggtcatatctgcataatggtttagttcatccaacgcattgtttacctgatcaagagttgtgccttttgaagaggtatttgcaaggattgtctgaacggcattgatctgggtctcatactcctcaaaaccggttttaatcggatcgatggtaaaagcggagacaagattttttccagcagcaagtgcagagttggtaatgttctgcaaagctgtaatcgccatcacttccaatgccgaaaatcgcactcgcacagtctcaactgcattactcagcggtgacatattcccactgcatttatttgcggcatcgtttacggtttctaagcctttcgccgccccttcgaggttaaggctcttcttcaacttatcgaggcttgataaactggtctgaatattctgttcaaactgtttgttatcaaaccgcatttcgacgacacgttcgtcaacagttgtactcatagcttagtaacctccttccatgccgcatctgcaattttgtcaaaaataggctggatagcaggattgatgtagtctctcccctgtacccagccgccgtttcttgttgcatgtccgtactgcaaaataactgcaatagggactccattttgaatatttgtgttgtaaaagctgatcgatacggaaccttgtttctgttcgatcttgtaatgccacgaattcgccgtcagtcctgtatcaactggcgttgcagacgcaagggcggctacgccctctcgaccatacttatcgaggtcaccgagacgaaccgattcttttgctctctctaagaaccgagtcagcttagaaaaatcacccttttgtctgaacgtgatcatatgaatctcctactttgctaagtacgcactggatgagaaccctgtgtactgaacaccatcgagtacaaactggatgtacaaccacttaactccatttgccattgtgtagtagccatagcacttaaccttagtgccagccggaattttacaaagagccttcttatttgttccggcatcattacggcaataaagaaccgccgttgttttgtattcgccggcataggctttgctaaactgtttagcagaacaggtagccaccactttctttgaaatggactggttctgatcctgcttggtatttgacggggttaccgccgatccattcagaatctgatttaccatgctctgaacttctgagtagctgtatccatactcagtaagcagtttcttacggttctcaccgcttccccacagtccaacaatcacctcatgagcaacagttttgatatctttgcccttgcttaatctaggagcggcaactgtattgtcatcgtactttggtgtgatgaagccacggataaattttccgttaatagacagggttctcttcttgaccgcattactgtagttgccctcttcaataaccatgtaaccggattccttatgtacctcgattacggtaccgacatgatctggattgcctgtgttgtcgctgattccgttatcctgccagtcatacaaaatcgcatctccaggactcggaacataagcatcgttctcctgccaacatcccattttctttgctgcttcgatgaggtaatagcaggaaatttccataggcatgatgctctcatatcggagagctgccgctaacgcagaccaggtgcacgcacaccaagcccagtcataacgcatccgaatgccacgaggaaatttgccagcgcagattttctcaaagaattcgttatacaaatcgataatgcttttgtgtgagccgttcgattctttctttccatcccaggattcgacaagattaacgacggcctgtctcgatttcgccatttttatcactatcctttcgaattaaatttctttctgtttgcggcgtttacttccgcataatgtctgtataaatctcgtttgctccgcttcttcgggggcttgttttctgcattataaatccggataagcattaacaaacgattcaaatgccatttctgacactcaaacggaatgtgatacgccgtcatccagtaataaataagttcactggttatctgctgcctatttattggaccgcctttttcttccttaacagtcgaagccgtcattggcgcttcaatataggcgtttaccgcatcaatgtgcgaattggtaatgcattgatagaccagcgggtcaacattctgtgtgagtgtcatacagcgtatataatcaatggtttcttcaattgtcttctgctctttagataagaagactttgcaccatttactttcccattttgaaagtgaaacgagcgaatgctccaaacgcaacttctgttcctttacagggataaatcgctgattccgctcatcccacagatcggttcttggtatcgtaagttcaagcattcgatctcacctctttagttcgtggtggcaaccacaggagcaatcttcggattttccgaatgcttcttgatatctacaactttcggaattacatggtttacgaattcagcggctttgctgtcatctgtagccagttccataaacagaagattgtagaactgagtgcaagcaaactttctggaaatctcttcagacttctcgaaatatgtaccgtcagcactcttctctccgtatgcctttaagataaattccttaaagaacttgataatggtcggctgatcttttgcatctacgatgcgctgaagcatctcagcaactccaccagctgtgcccagttccatctccataacctctgtttcggtaaggttgaagagctttgtttcggtgcgctcaacgccgttaaaatctttataagtctttgttactgcatacatagttttgttctcctttcgaataaaaaggagtcgccagctttcctgaatacgactccatctgtggtgtgtattatttctgattagccttctgcggtcataatcttaattacttcgtccggaagcggaagtctcggttcaacaccatcatctgcttcggcggaagaaggatctttaccatacaggatctcttcaagagcagccagtttcttagcatcgaccttggtagaatcgaaggtgagaatggaagtgggcttcaacttctttccatcgattaaggttgcaatctcgactggtgtggtgctgaactcccaggataaggtaatagcttccggactgtcatttacagttgaataacccttctcggaaggagaagccaagcaaccataaacgagatgaagcttatagccgtaatcattggaatcaacatcgttaccgagaagcgtcttgtaagataagccgaacatcttacggttctgctgtcccgcaaacactccaggagcaatctctttggaaccgtcgcactctgcgaactcatccggtgccatataagcttcgattgtgccgccaaattcctctgcggacataaggttcagatacttgatattgtctgcataaattgcagtaggttctgctccagacgggctttctgttacggtactaagaccgttccatgcggtaccagagttatatacgccgccggtctgaatcgggtaaaggacgccctgactgacaccggtctcatacaggcgctcgccagtcttgtcccaaacgagtttctttttcatagaatttgtcctccttaaaagaatatttcaaagacatcgtgatttaagttgtctttcgtgtaatgccgattgaatcggcttgtcggcatagatgccaccttgccaacgagagaactatccggatcgctgtcaataactgttaccgaatactttctcgcagacaaataaaccccgtcattcgcaaacgtattctcaatatcgtcgagagcgtaaacgatggcggggtatttcatttttaccgatgacggtggttgaaaataagcacgacactctggtcctttgtttggacacgagaggatgtcgcataaagcattatgcagtttcagtcgtctgctcattgtaaacacctccaacggtcaatattaaacggggatactgaacttcaacatttgaaattttccatttagctcccatatactcgataaatctcatcgaatgaaaattcgcataagcaaacggatcggctacgatgctgaactcattcgacacattgagattgtcgttgaggttatccgaactctgatactgtcgagtattccgaataacgtctccgtagtagtcacgaactgtaatcttctctccccagacaccaggtcgaatttcctctgttacggaatagccgattgctccgtaaaatttactcattttgaattttctcctttaagactttaggctgtgtgatcctcggaaccggaagaagcagttgttacatcctcttcgattgcaattgcagagtatacacgagtaagagcaccagagcatctggtctcaagcagggatttctcctggttgaagtcgatatcgaactgagtgaagtgagtaacctctccacccttggttgcaccgagggagtaatcagccagatttgcgataatggcaaccagcttcttctttttgctgtcggaagtggttctggtcttaccctcaaactgctccgcagtattgatactaccaacattcagtgcagtggcaagttcggtcttggaagagtaaatacgtcttccgttgatgtctcttgccagaagcatctgattcagcatatgaggagtaatgaacagatccggggtaccggtgcccttataatcctctcttgcatacagaacggtattgatcatggcctctgcgatgatgtagttctcaccaaagttagccgcggtattggttccctgaagttctttcttagcagctgctacatcgagatcaacgtgaatggtgtacagatcatcatccagccaaatcggtctgatgtgatccggagaaatcttgccttcatctccgtcgtctctaccatcacccagcatgattgcagttgccagctcttcattgagcatcaggcggtcgatgttgtacaggtatgccacatagtcgaaatcagtgatgtcgatgatatcatctctatgcagcgcactctttacatacacagtctgagggtcggtagttctgcgaaccagcttgaagttgccagtctgcttcttctgttttcccttagtatagcctttagccttaagagcatcgatgttgcggatatctacctgactagttctgattctggaaatcggactcttatgaactttgttcattacagttgtgatccaaccctggtcgttagtaatcagctccggtgcaccaggacgtacatccttgtattccgggaacagaagtgttacattgccatctcctgtctgagcaaatccgcttgcaagagcatcatgctgaagtgcattctcattagcatagatctccagcgcggtctggaatgttcctacctggcttgtctttgccagcttaaggatctcttcctggtctgcatgagacagaaagctcttatcatcgcgcttgtcggtgtcaaaaacattgtgtttcatattgtcatctcctcctttagattcattatcctcttttttaggattttctttgtctacgaattcagccatcatggcgaaaacggctgtctgctgtttctcgttcatggatttaaaaatgtcttcgatagtctcaaccttatcgtcttttttctctccattatctgatttgtcattgggctcgattttttcttcttccttctttttatccggctcatctgcggaatgctccaactgccccatgatcatttcattatagccaatgacaataccggtttcgccgtcgccatgcatcaccacatcatcgataaatgctcctggatttgcaccggctaataccagacttacttctctgataatgccatgaacaacatcgtgtccagcctgtttaagctgattggcaaagatagaaagagactgtacgtcgccatgttttacaagttcccgtgcagtctttcctgattctgtatcattaaattcacagaacgcataaactccttcatctctattttcgagatgagctaatccaagcacattcgccggatcggcatgattatgcatccatactaactggacagtctgcccgttctgccctttgaaagcgtcttttttaataactcttccatcggcacactgaagatcatttctagtggcccagccaccaaagtcatacttcattttgattttcctcctttattttctgatatagtacgataacggatgcgatgtcttctttgatgagccggaagattttttctttgatttcttaaccttcttgtactcagactgaattttatcgaattcatcctgatacgtttgttcatatgaagagtcaaggtcggcttttgccgctttgtaagcttctctaactgacttaaccgctgcttttagctcggagctaacttttgctctttcgcttttagcattagtctggttctcagctttttcttccttggtatcagacgatactttcgctttcttgtttgtcgcatccgttcgaacactagccttgtccgttttggcatcgctactgatttttgctttatctgattttgcatcatttctaagctttgcaatctttgctgttctttcggcaacacgcttagctctctcagttttagataatcctgacggaatttctatcgccatcaaacgctcaatttctgcattctttttattatcgattcgttccttttcgctagatgattccttttcaatttcttccaaatcagaatctttatcagtatcgatgtttttcttcctatcggaagcattttgggttaaagcctcgttcagttctttcaagcgagaagatatctgttccttcgtagcttctgctttttcacgaagttctgtaatcttctgatctcgcttttcctgctcctctttgacttttgcggccttttcagatttaatgttattttttgtataagaccaaatcttctttccatcgtcattcagtgaagtggtagaacgccccttcaattccctggtacgcatataatattcatgcgctttctgaggatcgtagtagggcgatgcataatgtctaagaaccgctactttaggttcatccattaagaatcatctccctccttatcatcgccagatgtataatttccgacgatgtcatcgatctgtgcagaaatactgtcaagaacttcattaaccagagcatcgtaatcactggtatcgctggattccgttccatcaccacttgtagcatctgttacggaaccaccaggctcacttaaattgctgtttctcaattcatctgccttaggatcagcggatggcttccaaccgattacctgtctgatttcatttgatgtagcaatttcatttctggtaaacttatcagaaatttcagcaagatcagctaccggcacaagcttgaatggatctctaaagaacataattgacttgttctgggacctagcagtctttgttaagaattttctcttcatttcatcaacgattgcagaaatgataggttcaatcgtccggttgtaataattcagcatagtcttctcgtctgcggtaccatccaagatgctctgagtgattcctaactggctgtaaagcatactcgttaagtattcaatctgcttcattagattgttttccaaagaacgattcaactgcgtgattctctctgttccatcggtataagcaatgccatacttagaaccggacaactgctgctcgatatctttacgccgctgctcagcctggtgacgtcttgcctctgatttaattacataaggtagctgaatgatcaaatccaacttgccggagctgctctgttcatcgacagcatctagcaaattcaattttcgaataagcctctgcatcgtcgaattcggttcgttaattaccgcatacagtggattttccacgatagcaaccgtatctttcggaacaacaatttcttgttttcgcccagtattttcgttgtatacctcaacacggacgtgacgaggataccagtcacgaattcgaccaactcgcatcgaaagaatctgatatccttttgtgtcatctggatcatcatcggtatccacaggaacgattgctacacagccttcatccatcatggacataacaacatcttggataaatgccctaccagtctgatcaagattggcttccaacgacaaacattcgtttaaaccgctttttataacatttaaaaaccgcccttcatcatccaactgaacgtgctgaatgttgatggcggctacgtctaaagcgattctattgtatacggacgtgactatcgatctttcgtttcctctggtaaggcgaaaacgatcaggacgatatgaataacccgaaccgatattctgggacatcatggtaggggctctattgcgaaaagcattccaggcatttttaaacctggaacttaatgataaatccattttgaattctcacctcctaaaaataggcaaaaaaaaagaccccttttcttaagaggtctccagtaattttacaccggtattttgttcagtatagattcgcatatgattccgttactatcgggattataatgctcgtctaaacacttcaatgtcaggaaattcccaaccttttcttctatgtctgcccaatattcatcggtctcagataaaccgttaaaatcacagtccaatccgagtgaccgcataaggtttatttcttcttcactgaacatatgctcatcctttctttaaatatttacgctttgttctacttcctgtacaccatgtagttgttatggttccattttcaggattcactgctactgtcgcagatttccctataaactgctgacttggtcgcccaaggttatcggtttttgttttaatgctaccatgattcaacggatttttcaatgcatccaaaattccttcaacggttaccggtcttgattcggtttgtgtcctatcaagggcatgatctgaaaaacgtgtaaccagtattccgtttgaagcttttacgggtgttcgcaactggctattcattcttgcctggatagagcttctatcatgagctaattgttctttcgttctccgaactccccatttcataccttttattccataatgcatcaaattatcacttgattcaatatgagctacttttctgatggtacagggtcgtaatacagaagagtaatcaattaactttgctactggcatctttatccccctactcgaatgcttctcgatttgccttgaatgcgatgtacgcatccatcattgccgcaacggcatcaattttttgttcataccgctttttcagcaatttacggttcccgttagtatcttccagggtaatgcagtttcccatagcaaatgtcatcaagtcctcatcaaagagaagcatcctctcttctgaaagtttcttcaattcgccaagtgggacagattctgtctttgcaccctggataactttttctattccgaatggtccattttcacttgcccaacgttcaacaaattcctttgcattgtatgggtcataaccaaagcatcgtacatcataaccgcattcaataatatggttatccaaatcctcatatacttccatcatgtcaagaaccgtcccttccaacacaataagacttccctctttcataaactgatcgtatttaattctcattgctgctgggagtttcatcagagtcgatgaggaaatgtagtttctggttttgacgccgaatgatccgttcgacaatgggaataaaaatgtgaatgcacagaaatcatcgccttgtgataaatcagctcccaaagaacatggcatctgccaataatctcgatggcgatgtgggagagtttcttcatatgtaaagtaatatgtgtatccctccataggaagtccgaagcgcttagccaaaatatcgtttcgagctgccggagccttttctgctctctcaacgtccagctgataggtttcataagaaacagtctttccaaggttcggatttgctttcaaccatttatccggatcggcaacctcatcaatagaatccagcttataccaccagatcgatacgtgcggattgatataatccccttttagaatgtccatcaattccattttgattgtatcgccagcaccgttacggacagtaccctctgaactgatcgcaacgataaggtagtcgttgaccttcgatgcaccctgttcgattgctccgattacatcttctcgaatatcaccagaaagccactcgtcaaccgtcgccactttaagctgaagtccctgaagtttgtcgattctcattggacgaatttcaagaagcgatccagtaaggaagttttcaattcctttcttagtggatgccaatttcattctattcgcctttgatccggttgtgttctgcaacgatccttctgtaaggaacttatagaaaggtcctcttgatctggtaatagcggttcgaatcggggacaacacctcttctgcctgcttcatcgtcggggctgtggttatctgatgtgtcgttgtgacatcaacatttaagaagaaattctgcaagcatgaaccatacattgactttgcagcacctctggccactatgagatattgcttattaactaatctttttcggatagacttggtgacataatgtccgccatgaccatcttcataaggttcgtatacacttctctcaacaaaatagtaccagccgaaaatctgctcagcccaaactttaaatgtgtcaagcagtttcaaatctgaaccgtcagttaaagtaagctcattctcgcaataactgataaacccctctactgcttgatcgtcgtaataaattccaggatttgcaatgagatcatcgattcggttcatctccatctcgatttctcggcataccggaatttcgccacgaattacggcatcacgaaacatgccgtagtatttcgggacggcagtgttcgataacgccattattttcttctcctacttcttcttattcgggtttgcagcgatatactgtgcggcctctttaagattgaattcttttgtcattgcagtctttacggcataggtcattgctccagccgcagccacagtcaacgctttctttccggatgcagaaagaatttctgacacatactttctaccaggtgcgatgtcgtcttctgtaagattcttaaactcgcgttctaatttaagtctctcaatctttttcttcagatcggcatcggacattgttcgccgattcttaacagcagctttacgtgctgatacctcattcttatcatctgaagatttggaagaatgtcctctggctcttgcaagctgtgcttctgatcttcgaactccccatttcattccaagaattccatggtgtgctaaataggtgttattcattttgaatctccctcctttgcgatgtaactggtaacacctccgctggcattggatgtctgataatatggaacttcatgaatcacaaggtcttcgctaagcacctttccagatgtatccaaagtttgagtctgatgtgcctttggcgtaacttcgtacgatccagaataatgctcaggctcgtccggatcggcgtcatcgttttccgcagcaacatttagacgccattcgtactcgctgatttgtgttttataacactccagcacggccgaactaagcggcggatcgaaaagaagtttgaccttcaaatgcatataagatttgacaagcatgtatttggattcatcagaaatgaaatctttccacgttgcactcttatcttcgatcatgaaacctttggatggaccgacaccaagctgtgtaagaattgagaacacagaattgatgtgcatgatcaaatctacatcgaaatgttcatactcctctgcgataccgagtaatttcttgattgatgtcagtacactatctgtaatattcatgatcgcacctccatctaacagagttttataaactcactcatgcaatacccgctgataccgtccacagtctttactttataaaaaccggaaacagactcatcgttgcataccttcacaactgtatccgagccgataattcctaatgatctggatgcctgcgtcgggtctttgcgaatgtttaaattcatacaatttaccacaacacccataagtggcttcttgtttccttccataattttcctcctaatgcctccatgggcatgtatcattttttcgtcgttcatttggaactgttaaaagtagtttctcatctccataatgtatagcattgtgggtcgataaagttgttgcaattagatactctggattcagaaccaaatcagtccgcaacagtatgtcctgctgctttattgggttcatatgatgaataagaatctttccacgaatctcataaccatccaatccaaggtcgcatccattatcacgaataataatttttctccgaatgtccttccattcttgagaattgtaaaatatctgattaagatacctatcaaatccgaatgtctcttcaccaaccactccatccaaacgaagatactcgtatcgctccttaaaggttgtaagttgcaatagttccgaataacatttaagcatcatccacctcatctccatgaccgctataaccacgaaatgcttttaatgcatctgcatacagcttttcagaattttcaatggatttcagattctgagtcttcgcctctatcagttccttctgtttttccaaaatctctttttcaattctttcttttgttgaaccgagcttcaaatagtgagtaatcacctgcgacgaagcggttccctctcgtaactgcttttcagccaagtcaactgctaatgaaacaagctgattttctctcgcttctggcgttaatgctggacgcatcatcctagaagactctgattgctttgctttcctcaaagttgatgcctccttccatttagttgttcgctacttctgtgatggttttcgcatactttccagtatttaaaaggacctacaaatcatgacaatgctactcaacgaaaggagaactaactttgagccgatcccacagaaaccgttgtcaaatatcatgagttatagacccttgtaaatactggaacagctgaaaaggctccctaaaaatgccctccggggaaattttaaagaccgccacgatatgggtgggggtatgttttttagacacccccctataccccttttagttatgtactggcggtttcggcttttgatatcccgatgaaatcacttttaggaagctttttctttatgttcatttgtttctgatttacttgtaacctttcgatagatattctggaaatcataacggattatctcgtcaatggctcgctctacttccttgttgttctcttcatccgataactgatccgatgttcgagcgattcgaccaaggtaagcagttgtgtgataacccttttcctcatcgaacatgaaccattgagtgaactgttcaaatggatcataaggattatcaaaagttgtaagtgcaaacctcatcttacttagttcactcctttccattcaaatacttagaaactgtcgaagaagaaaccccaagagcttccgcaatctctgaagtgctatagccagatgcgctaagtgcagcgatacgattctgtttagctgtgctcagagcagtgcttgcacgaggagttgctctctgacgaatagtatcggcattcgtgttattcagaatttgtgtaagcttattctcagaaattgctccggcctggatagcttcccattctttatccgtaatttcaatgttagatctcttggctcctacagaacttcttgcctgtgccagagcctgctgactagccttcttaacttctgctttcgtcatatccggattgtctttccttttagcagcaactgtagcattcgccattgtctgagcctgtctctctctaggagcattcgccaaagccaaatccaacttagcatttaaagactttacttcttcagaataagttgccttagcagaagcagagtaagcaattttgcctgtactcatcatctccctacgagcctggttagctaaagacttcatagaattcgcatagtcggcataagcttcttcctggggggtacctgaagaaagagtacgggcgtcttttgtttcagccatctttgtactcttctgagttctcacctgaatttttccattcttatcgacatactcttccttaacagacttgtatgacggcgatccatcttcgttgattgtcggagagccttttctcttaagaacctgtgtctcagattttgctcttgaaattagagtagatgctccttcatggtaacgaccttctgaatctacatttccctgatacttcttcttaagagaagcgataccattgtcgatttcactctgcttataatccagtttgtgtttctcagcatcgattactaccatactgtgacgaaccgctctcgctaattcatcctgtgtggctcccttcaaagtcatatcagtaatcagattcgatactttacccatttctgtctgagtatttctcataatcttatactctttaccattacgataataatggtctatgccatcagcatctttcttaacagttccaccataagcatccttggtatcgaaaccttccaaaccttttaatggagaagtggaagtaatctttaccttactctttgtggagttacaaggaattaccattacggtatcaccatcaaagtccgctccggataaacggtctgcattcttcttattgataccgattgcatccgccggtgtatttccgagaacgctctttccttcagccaatttattgttgaccttcagaataggaatctcaaaagttccaccatgcgggtatcgaatcaaagcaactgtttctccatctttgtagtttggagcatacacctcattgtctttgattgttgttaatgggagaattacctgatacttctgacgaggtaacgccgctgcctgcaaatgtacggcggccgcatcgcaatcgtcagcaaatgattttaacagagccttctttacagtggggtttgttaatgaacagatttcatcatattctgcctgcttatcagcttttgccaaacctaactgctttttgataagtgtcaaactctgcttagaaagaaactgtgacggaagtgtcttactccattcaccccaatcgccttcttctgctctcttattgatcagagaaagagactgtttttttccggttacaggatctgtatacttaccctttggatcatcgtaatagctctgacctccatgctccttaatcagggaaccaaacggattatctggatcatccttaattttcttgagaacatcttttgtaggagtgccagactttttattagtgttgaaaatcacatcaacgccatccggcatattatctgagtaaacagccatacctttaaggtagtgagttccgtcaaccataatacggacctgtgcataatgagaatcacctaaagacaggtctttcacacctctacggagttcaattacaccatccttatcaacgccaccttgatcggcatagcggatctgcaagcgctttgaatccatgctggccggatactcaaaagattttctgaaagactccccattgtcataggagatgtagtctcttacagaatggacattctcgaagtcataaatatctttgtgctcggttcccggtggacaaatgaccttgatattggtctgctttccaggattggtaacctgtggaacgccgccgccataaatcggataaccttccaattccagcatataaagagcctggtttagtttttcttttgacacgccaagttctatttcaacgccggttccgacatcgatcattcccttttcttcaatgagttttcgcagaacatccgcagtggccttagcctggttcattctgttttccgaagtttcgttcaataaagagcggacagacgagtcattagcaaatcccatcttatcggcaatttcatttaaactgtaacctttttcacgaagaccctttgctgttgctacctgaagagcacgacgttcatctttagcgaggctcatctgagtacgaagctgtgtggtagtcaaacccatattcttagcaatgtctgtttcgctcattccggatttttttaattcctgaacacgactaagaaaatcaccgctatgctgatatggattctctccagaaccataagggtaacgcccagaacgccgtggcataccataatgcattaaaatatcttccacaatggaattcatagcttacccctcctgttctctgattttcttaatcaccttatcaaaagtaataattcggtccatgattggaacaatatcttcagccgttgggttatgatacagaatttcattgttctgatagattctcaattccatttcaatatccccaggcttcactttatattccaaacaaaaaagagcggcatatatttcaagctgctccatgtgcgccggaatctttccggtcttcaaatcgtgaattcttaagaagttattccgaaacaaaatcgcatcggctgtaccaaaacaattatcggaatagtaaaggatctgctccggtgtcatcttaaagccgatggcatcattcacatacatatttaatgtctgcttcgattttggtaatttctgattgagcatgatgcactgtgctgcaaatgcatgtaatacagttcctttttgtgtggcaaggaaatttcgatatgcttccgcaactttatcctcaccataatttatccagtgatatttactggcaccaagaaaggcgtgttgtccttcaaggttcgaatgattgttgaagttcatccagtacctcctctttattctctggacatataaatcttgaaaacgacatctgattcatacgatccacataatattcctgattcggctgcttctttgcgccagcgctttttttacattctaaggaagcccatttgtctttgtgaagaaccagcaaatctggaatgccctgaatgtaggtcgggtcatttttcatcacgatacaacccggaaatctttctttcagttccttgatcaaatttgcctggaacttattttccaacataatggagtctcctttcaattttctaaaaactcaaaagaggatgtggtatttaataaaaatgcctatttatcctctctcttcataaaagggcatgtttttttcgcgcgcaaaaaagagcataaaaaaaagacagagacacgattaagcatctctgtccaaatatgtagttgtcagctgttatttcttaaataccggatcagtatccaaatcaaccataagccaccggtacacaatgtaagaatcacatcaaggattaacccagccgtgctacgctttttctttccacctttactcatctatcgtttctcctttctcagcttctatagcttttcgatctttcttaaatatctttcctaaaccactcttagcagaatccatagtttcagaaacactttctttcaaacgttctttcttctcctgcttctcagcggccttctgttctttagcctcctgtttaatacgaacgtcatcatcaaatatcttttggctctcctcgataacttcagccgttatgtatctcagacaaacagttgtaccgactttcaccttagcgccctgcttaggatttgagtctatgacttgggtatcctcgtaatctcgatactttggatctgcttctttcatacgaagcttactctttgaaactttcaagccacgttcggttaataattcttcagcctgttccaggtctatcggaaatcccttacgatataattctggaatgataactttcgtatctattttttcagtcggtttattctgtgcgttatctattgctttttcgaccaaaggtgtaaccgcagtaatcaaaccgccaacagctccgattgctcctatgacacccgaaatattcttattcgatttcgttcccatacaatcaccctttccatacttaagtaggaatttagggcaaataaaaagtgcgccccaatttgagagacgcaccgaaaaagcgcatctcttattgttgccacacaatcctcttcgccgttcaagggtacgagtaaaagagaatacactttttaccaaagttattccctcgaacgcgatttcattattagattgtgtggctcttatagtatagcatgaagcacacaaaatggaaagtggattctgtagcaggatcctatgccacaagcatcttagcacgctttgccatatcatcgtaaataaccttggttccatcttccaaatatacgacaatgctcatgtagttgtacggacggtaatcctgggcttctttcgataaccgcggatacaccgatttgaaattattgaaaatatctttccatgttacctttctctttacattcacggcaaacctcctatcggatacaattcaccaaatggatatccacaatacgaagctccggcacctgaataaaaatccctaggaatggtataaccgaacatcacatcttcaaaagattgatacggcggattatcaacccatagccattcttgtgatatggcaatttcatttttcatcgtcacatgtgcaccattcggaatatctttattcactcgtaaatgatacggaaaatgttcgcacaaccaatcctcgaccaatttcttatcgtaagtcataaaatcacctctttcttgcttctggtcaaaaacccacttttatccgcctattactatatatttttaaactttctatcataatagtttagtattaaaagtgggaaagtgggcataaagcccgcaaacccgcataaatactgggtttttgctggtcaaatccgggtttttgaaagtgggcaaaaccgggcaaatggccagaaatttgaccaaaattcataaattttctccaaattgacaccgatttttcagttctggtcaaaaatatccgggatttggtcaaatcctaaaaccaaaaagtgggcagaaaaatgacctgttactacaaagatttttaacctagattagctgaaatcggtcagaaattccgtatctgatagggcaaattgcgcttcacaacaggcttataattgtacgtagacatcttagaatccggcacacgccttacagatttaagcttccgaccggtgcgaattttacgattctcttcctcagaagcatacatacgtccgaaggcttcacgcaaatctttagccagtttctccatcggctccaaaactttgttccacgcctctgccaaagtttcgcacgctttctgtaattcttccatagtcatcatctcctcgcctacctccaaacctttccagttcttttatccttcaatacaactcgtccctcgatatggaaatccgccaattcgcaaagtgaaaacagggtattcagtaactgatgaaatctcatgtcatccttgtcctgttcctgctccacattcttaatcgcattgtaagctgtcggatcattgtaaccctctgcattttttctgtcatccttagctatcatctctacctccccatctcatggaatcgtccatccacattgcagcattcataacagacagaacaatatatccaccaaaaataagaataactgccaaagtgataattcctaaaattaaatatcccatttacttaccctccacttcttctaatcgcacaccgccgtacacccaaagatcttctttgagtttgtccatatccaactcatcgttttgccacttttcataatattcgagaacatgctctgtaaactccggaatccgctttgcatatgtctttgtccaataatgatccatcagcacttcaagcggcagagtaagcagaagaatcatcgcctgattgatagcatcattcgtagcctcctgcttaactctatccagttcaccagatatcttttctcgaaccagggcatctaactgagctcttgtcagattgtatgtagcggtcttagctttctgctcacacttctgtgctcttctcctctcagcccggcccataccgccgcctccttaatccataatgcagttttctctcgatgcaaagagcataatacccaccatcaaggcaaataaaaagaacgttgcatcccactcgatcgggattgtcaacgctccaagtatgataaatataattccgtatatcttattcttaatcaagtctcttctcaacattgtctttctcctcttttgacttcgcgatgccagctgctacatcatccatttttatcattactccggcttctctgaaccgtccgtatgctttggctgtagcacaatgctcaatacacttcataatgcgatcaactaaagcgtaaaaacacacatagccgataagaaacatgatgataatctgaataactgtaaaatgcataagtttaatcctccgtttttcttttatagatataaccattgctactatttctagccgctccctgtaatgcgttaattgaattgagatctaaaccagatgaagacataataatctcagaatatggcagtgtctcgatccacttgcagaaatcacaccactcatccagcttatgtcctcgacgactcttataaatatttgccagaacttcataattcatcatgacattgcgcgtttgattatagctgctcgggagaagctgaatcatctgccaccaaatatctttcttgctcgggcaccctttaatctcaaaatcatctgcgttatattcaatatataattttcgataatcgtttaacgcctttattgtttcttccagtaatgctttggtgcggatatcgagatgctcacaactgaaatcatccattgtaaattccttagcctggattttatgcatggtactacagctgttggcaacagttccgactttgtaagtatcaaattctttccaccaatataacggtgctgtgatccttacgtacaccggcgacattctcataaattttctatgatctgtaccagcgttagctaagcgttgcattagtgagcgatcgttctctccaagatcgaatcctacaatatcgtatccagcagtttcatactcactatcactcttcccccagctgttcatcgggtttctcatgccttcgataataaatctcatttgttccggacttgccagaaccacatgctctaatttaatcatttttattcccctttcagaatatccagatccccaccaatctggattattatgctcttgtgttcagcatagcccacggttttaattactcttcttccttctcataaggaatctggatcacatccccaccaggaaccgtgaccgactgcataagctgaccggtttcctcatcgaagtaaatgttatccattgcgttatcccactcttcgaactgctcagcgatgtttctgcctttttccttacgcatgttgataagctcgtcatgaaccacacgtctccaggatctcgcaatttccatacggctttgagcaaggatgttgtacagaccattctcagtcacaaagttgacagaacgtctctgacctgctactactaaaggtagtttcagcttctcatcctcttcacacatttcgagcattctccactcgttaccgctactgtagccgatagcatgactaatatcttttgccttgaacagcggagcatccaggtctccgtatacattgaggcgtttccctccaaatgaaatacttccagcaattttaatctctttactcatctttgtttgttcctttctctttgtaatttaacgtctacagccttctgcaactcttctggtgtaatattaaaaatggacttaaggaattccaggcaaatataagcatctgccatctcttccaaaagtccaattctgttatcataccctcgaatctgtttactgattgcttgcgtaagttctgcgaattcctccatagcaatcgtacactttaatttccacggctgactctcaacgcttcttctgataattcttcgccgctctttatctgacaattcgatattgcttttcatgcactggacaaatctatttcgatccatcggtttcccccatccgagctttagcagcgtcctttcgctctttgtactcctcttcgtcgatctcagcaaagccgttcggagcttctttaaaatatctgttaattgctaccttgtccatggacggagtgattacgtacagaatacctacggtatcgtaatcgcctttcgctggatctacaaggaaatcctccgtataaatcttaaaggctctatcagccggcatataaggcatagtgatcggatacagttcgtccataacagtatcgatcagtccactgtgatatggagcatccggacagttgatgttcacgccatgatagcgatccacgtctctgtacttaaccgtgccatcagcatacacgtacttaaataaggaagacatgcgtttgcactgatagttacgctcttcacccttcagaccgctcatatcagaaatatcactccatacctcgtcgatatcctcaatcggaagaagcggcttgttgttgatgagacggttcagaatagccttagtcagaccaatgctgaaaccggaatgaccgtcattgcacagagagccaaaggctttcaatgcgctttcataacaagcacaaccataatcccattccccgtcttttctatctggattctctcgacggcaagcaatagctacctcattttcagcccaacgctccatgctagatttttcacggcaggaaccgatagagcggttgcgatcgtctatgtactcatttgcaaatatctttctgcaatttccgccaaatgcttccacgatttctggaaggttgtcgtttacagcatcgaagatcagtccgtgctctttacaccactccacagcctctttggtctgctcctcgtttctggatgtccaaaggatcagtttttctccgttagcctgtctttttttcagatactcgataagctcctcgttcggcataccaatctcaggccatttgttctcacataaagttccatcaaaatctactgcaataatgttctgtttcatttctaaattcccctttcagttttcaagccattcattatcaatatagtaaaaaccaaatacacacagtccaataacaattatccaaatcacccagaataaccatagttcccaatcgctttccaaataatcaacagtttcgtcaatggtgctgttttcataaaatgaagaattatcagatatagttttatcctgtaattcggtaaatatggttcctgtatattccgtgccaactccataatatttatgccggacatggctcgattcttttatagtgtcaatatgttcggtacttggaaactctaccttatttgagggaaagatatgccctaaaaatgtaatttccaaacagctttgttcttcgctaccagcataatcccaagaccaataagtttccgttctggtatgtgtctttcctttggaatcggttgtggtgacggttcgtgtatgcatattgtaatgttcctctattttttctatatacatatactccccgttaatttctggatatgaaacagtatccacagccttcaaatctccataaacgaacgcataaccgacgttggttctcatcccatattcaaacagatcagagctttcgattttaatagctttattatacttttcgttccgatcgagaatatagtttgaaattctcccagaaatcacaaaaccaatgagaagcatcgctgcaattattgatatgcttgccaaaaactcacgcttagtaatttcaaaatctccaaaatcaaagcctctgttcttcatagtatcagtctccaaataaattttgaggcgcatctaccggagcatcataatcaaggtactgatactgctgcatttcatatcctaaaatgtttaaaaataatctagttgggaattttctagcatagcgattgtattctttaatctgcttgttataattttctctatactcagcaattaaattttccgtaatggataactcattcatcagttccttgtaattttcattggattttaattccggatatgcctctgtaacagcagcgatcgcagtggttacattttctatactggttgctttttccctaccctcgacaatagctgtaagtgtttcagcctcatgcttatcgtattgtttgacacaatccgcaagattgtaaacaagatcgactcgtcttttttcctgaactttaatgtctgaatccgcagtgttgacctgttcctccaatgcgaatgctttgttttgtgctccctgaattccaaaaatacacataaaaataaccgcgacaatcccagcggccacgataagtaccagtttccaattttctttaattgctttcatctctacttgtcctccttaataatcccgataaattccactcgctcttctgccagacttacgaaatacctttttcccttataatcgacgatgtcaccctcgtacttataattcttgtccggctccgaagcatacgctaagatgtttatttttgtcgttctattcatagctcctccaaatatcaagctccaggttgcatggctgattgatccgcatactgcaatgcctgaagttttttcttcatattgtctaaaatatactcgactgtgattttcgttgtctgcgccagttttatatacttagaatgttcctcgtaccacttgaatatctcatagagatttccactctgccaactgaatgaccaccaatcgcaaatcatctcgatgatgtaatcgtatggcatttccaaaacggtctccagttcgccaccttccatatcatcatgaataagaatccagtgctgccaatgatgaggatttctgtgaatatgaagtaaccatgctcgctgatatcgctgtacaacctcataagagcgattatttccatagaaatatgcatcgtatgcctcatactcatccggttcgtttttagactgatcatgagcaaattctgtattccacccggcggttagggtgtttgtcataagtcccggtaaatttttagaaagccagtcgaacccccttttcacattagctcgatgcctagctaaatattgatcgtattgaaaactcacttttggccctccttctttttctttgttaccagcttttcataaagttctctcgcttcatctccctggaaagcattgataatctcgacagactgattcattcgttttcttcctacaaccattactccagtgtcatttttgtttgaaaaatcaacactaactaaaatactatctaccattttcagcctccttccagtaaataggtttatccgaatttgcgttcatcggttctgccaaacagtcattacaaggatcaaatttttcttcgagatccttatgttcgcaggttttgcaataggttttgaaatcaacctctttgtaaatattttccattggacacctcacatgtaatatcttaacaaaattgcatataatctttgttgatagtcacactctattagcagactgtaaaaatcttccgcagacatacttttcaacttgatagataaaatttttaaaaatatccacagattataaatcattgtctccacttaacaaacctcgtttcattaaatgttttcttgtccttcaatgctttactgatggcaagatcaataccagacctggatttcaaatgatagtaatacagatccgtatatggtgtattcatcctgtctattcgaccagcagactgtgccatgatcttatacgaataattctgagaatagaatataatcgtgtccgtcgtaatacagttccatccttcagccccggcattgtactgaactaaatatacccatgcatcgctagtcggcactggctgatgtttgtgaccgttccactctccgacttcgtatccagagaatatctccttcagaagctcaagctcataatcgaaattgtagaatataatcgctttcggatgcttttccacaatttcaagtaaagctatttgtctggactgatcggtgtttacaatctttctccacacatagcacagaccggcagcattgataattggttcttttttaaacgggtcccatctggtttttccgacatctttatacatttcgatattgtacttgacaaaaatatcctcatggtgcgaaaccgtctggcgtttgaaatccatattcaccaagattttgtttcgcaatcgaatcaatctaccagtattcaaatatcggtcaactttaggaaatttgctgaagcgactatagactatatgctctcttgtaaattcgcttcggtttttataaaatccgttagccacaaacaccggaatataatcctgccacgtatcaccaggagttgcggatagtaatatccactcatttaccttggcgattttcaaaaatgctttaacccatgttccagagcctatgacacgctgctcatcgaatataaagaaagcatctttgacatctgcatacttcttgatgttgttccaggaatcaatcacaaccttattggtatataaattctcttctttatccgttgataatagaaatggtgagagttcctcttcccattcaaaggtatctcgtttcctagcggttgtgattatgtacaaatccttaatgttcacatcgtccattggaacatactcatccgttccaagctctccgccatttcgaacataatagtaggccagcgaagttctggattttccactaccaacaccgccacaaagtatgcagccgtttcgcatttgccgtacagcatcttcctgatagtcccgtaattctacgccagccattacacacctttcgtgacaaatccatcttctacctcgacttcgtagccatcgccatccagatctgctttgggaccatacaagagcatacaggttgttatggtttcatcgctctgattctctgaatgatagaacttatataagcagtccagcacttttttagtgatagataatttacggcaatcgtatacagctttgcttacatcagaaatcccaatgattttagcaacgttgtcataaagctcgctgatgccgcacgtacactgctcttttggaatagaatatcttttcttcattcgtcatcaccctttccaaataacttgttaatctgacggagcattcttcttgtactccatacatctgagaaatacataggtgtataccaatatttttcagatgaatcgtccgtagatattgggtcagttatcgagttacctatttttataaatccagccaatccgagaagcgagatttggatataacacatcagaccaacgatttcatcaacgtcctgtgcaactactaagatatggttctggtagtttctcggtggttcacaatgctccagctgttttcggattacatgcacaccagcaatcaacgtcgctccagcaccgcagcatggatcgttaatcgaaatataaccatattgctctatcttttttaaagcatcagtcgctaccacttcggccataagttcacaaacatgatacggtgtgaagaattgacctgccgaacgatttccaagatccaaccgcataaacatttttccgaggaaatcctgctcttgattctgatccagggccatggttgtatacgctgctaattctggaaatatagcttgctcttcttttgaatactgatgaataatttttagataccgcttctctctttggtcgtagttttccttgtccaaaacattcgagattgaacatgcatgaagtaaaatataatctctccacacatcccatgcccgatgtctgtatgtaagtttctgaaaagattttaagaatttattttccaagtcaattttgggttcggatttcgtagttacttccggtggtttctcatccttctttttcgtttcaccgaaagttggttgccacttaggtggcggttcttttgctttgaatgttttaggtaccgtagtcttaatctgtggtttcgacttcgtttttttcttattccaaaacataatttttctcctttcataaagtaagagtgccggctttgacaccgacaccctcaaaatatgatttatgcgaacggcggctcctcttcatccgcatatttctcagcaaacacgtcctcctcaatcgtgacgtacatggtcttcaaatatgccttaatgccggattttccattcacttcccactttgacgggctaatgaccaaatcaacatttctgatttcagcatagtcaagagaagatacagactcctcatccaactttgttttagctcttctggtaaccatatatacattcggcggaatgttatcgaaccgaacagctacctgaatatagtgaagaggttcttcatcctcatctctcggcggaaggattcttacattccatccgtcttcgccgagcttctgcgcctggtctgcatccggaatcacaacgcagaagttacggttacctgctctgttgtacttagtctcttctcctctgaaatttctgaacataatacgagcattctcaataatcagctcatttacatttgctcttgccatgattaaattctcctttattttttaattttccggcggattcattgcgtgcttcatcacgatatctgaaatatcataatcaaggtcacaatccatgtggaagttatcattgttgaaatgcggacagtcgaagcatgtccgatacttatcctctccgcaaggcatcgcccatggaacaacacaatcgacatcagcgtcgttggcgccaagttctggaatatacggatcatcagacacaaaccactcaaagtctccgtactgagaaatagtttttacagcctcatcaaccagcttgtcgtagtaggatcggtcaatgccgtcttctttaccaagttctttgaccatctctgattccatccaacgataacctttagaaccagttgcagcatagtaacgaccgtctttttctctcatcagaagtccagctccatatccatctttcatcggacagaactgaccaacctttccaataaaatgatagtcgtgccctttttcaatcaatggagtaagcttctgacatgtagcttcaaaagtggtgtcggataacaaccccttcttatagtcgctctctgccttgctgaattctttttcttccttactgacatccggtaattcctcattcagatccaaatataaagagctactcacagatttggtctcgcacatatcttcaaatgcgatgtcttctctgctgaacagcttcttaaatacatatggaatctggaactgagtgcccgttgccgtccattttccgcctttctttttgttgtcgccagggacataaccatacatcttctggcattcttctgccgatttgtactttgcaatatatacggcatcgttgaccaagcacatccgatcgtacgtagcctcgtgttcaaatgtgtatccatatctctcaccaaagtccatgacaaactgaatgatctccggtgtagcatctggaatcttaatagagtctgtcttaatatgagcaacttggaatccacgcttcagaacctcattcttaaggtcaatcatgaataatgctccacgtttcgccacaatgttgtcgatgtttcttggatcgcggaacggattatcaaaggatgccgatgtaagaccgtatactgaattgatagccgtcttaagcgcattggcaagatcctttgatgtcatctcgccgtcgataaccctctgaatatacggagtaagcttgccgtccagcatggtattaacaatatcccaagcctcatgcttaatacttacacgaccctcaacaatatcacggaacgccttcgtaaatctcggtccaaacagaacctctgcaatagcactatgcggatgcattgaagaaatatccaggagtgctgcatttccatacattccgggtacgccttgtgcaaatccgccctcgcctacttcttctccacgatatgtagattttccatggtcgaatacatacccagggaaatatggaagaatgctgtgagattcaaatggaacttcgtccttatcgttgtacttccaaccatagtgaggctcctccatcatcttcgggcaggcttccttaaggaaatccatactctccttatccagcgactctaccggttctgccagatttctgtaatggaactctgactggggtttccggttgtttccaaatataattctggttgtaagtgagttcgttgtatcgttaacggtcatttctgctaaatctgccagaatctgtcgcgccgtccagtcagcctcaagataattaaaggccgcctcagtagcaataacatcgttatcacaatactcagcgaccttaatccaaagctcttccggaaccggttgatcccatggaagaccaagctcctgatgatgcgttcctgccttgataattcttattttttcatcggagaatccttttttcttgagatcgtcatcggtgaggtttcccatctcgatttccaatttcttaagactcttcttattaccagccgaagcgaagtcatacacatccgtataggatacattatacgcttctccaaagaaacagttcggacttccgttaatgatcttctgcgaaaggttgtagagctgttcgtttgtataacccatcaaccttgcgtacagaatatggttatcatatctccgacagttaaagccaaccagtctgaaccgcatcagatcctcgatctcactcggagacgggttaatcattcttacaacaggctttccctcaccctcgattttccagttcacaaggaataagtttgggaaaacctcaatatcatagaataccagctttgcatcatcgtttttcaccgctgtggacggatctgcggacttaaactgcattttgttgaccaacttaatacagtaatccgcttgatgagtgctattcgctgcaaatgctaatactgcattgcgcatgtctgtgacgtcgtacttcaaatcgctttcatacgcatcttccagtatcttgtagataaaatcgatactgggcttagttcccggatgtatctctttgttaagattccgtttgatcagtgttctaagccctttctcgctcttaatcgcttcaaaatttaccattttttgttctcctttcagcggtaaaccagagctaattgttgcgataggcaaattattacactttgacagcatacgccgtaaagagcttttgcccgtgaacaccttaacttcaacatggtcgtcatatactctgctaagctgcgtcggatcgccggtataaatataatgaagatgtataccttgtcctgatttactaagctcggcataggtaggcggccacttacttgcttctgctaaattcttttcaaatgacttatttccagattcgtctggaatatcaaagtcaatcacaatatgattctccggaactttcacataatgaagttttttcgtatcaattccagataatttcgtgcggacagaatcccattttttctgaggtgtttcgttttccgaagcatactgtgcagggcattccgaacacacatcatcaaatatagattcagtgctatcgaattggatcagtgccggtttgactacttccgccttttcctctacagtttcttcttcaaatttttctgttctgaacccgatgtaataacttctaacgcgagttccatcatcaagattgaagcgttcctgaaaatcatgaaaatagtttttaagttcctctttgaataccctctgtgaaaacgggagcccaactttggcgtcgtcacagtatgttttgtacatctcccatgcggctttcagagttgtcccgttttctttcttaaatacatggtacgaatcgataatgaagttatagaaatcattagatgcaccaagcatcgtaatcggaatataatcgtcataacgaccaggattgttcgaatatacctcctggcagtggtaagcgatagctcccaactcaaattccacttgcttcacaatcgttttgtactcttttggattcagcttatttccagacggcgatacatcgatcaatcgtcgaatcagaccggactttgcatccgtaatcttgaccggcttatttgttcccataaacaggaaacatttgaaccggtttgagtacgtagacttgaatttttcgttcacagtcatcagctcatgagataccaagctgttcaatctggtattatcctcaattctcgataaatcgccatcgtgctgaatggcaaccagagggtttgttttaaatgcttccaatgcaaatgaattgctggaagatccaagtgcttttgcgtcaaatacagaatagtatccgtcgaaaagctgctgaataatgttaagaactgtggatttacctgttccagcagctccgtataaaaccataaatttttgcagttttttggattctccagatacgattgaccctatggcccactcaatttttgtccgctcttcttccgaatataaagtagacatcaatttctcataggcagacaaatcgccagcttcaagcggataattcaactttttgctggcgtagtcttttttattagtttctgtattggaaaatataagtttgtcatccaacgtatgaaagctgtccctcatctgcttctgacaatacttatgccatgagtcgatcatacccgactcggcatcccacatatgcaggactttaatatcggagttaaaacgctggcggttctcctcagcatatctatccagttcgcggtcaatgagctgcaaggcatcttgctcgtccgtagaccataaaccacgttcctcaatccagatagcatagaaatcaccacctcgaatcattagatcggtgctttttttaataatgaactttggatagatttctattactccacgtttcgttgaacgtgttgaaatcaccataaagtcgatcatcgcattttttactctccttccggacgcttaagttcctcgatttccttttccagttttctgatacgcagtgcctggtccttctgctcgattttcataacaaccaagtttgcagttgtcatgacagcaaagattgtgagctgcttattgaagctccgctgtttactgaccgctcttgtaacaacgtccaatcttttctcagatgaccgtaagctgctaaaaatataagtaagcatttcgcccattacttcttacctcctcttaatccgttcatgaagctctcaacagtctcaaaccgccaatttccttcgttgttgaacgtaaatataaattcctgatggttcttctgacggatgcgaatactgttctttccgttctggaaccaggtttccacattatccccagcgtactgcggaaaatataactcgaaccacttgtatacctcactatggctcataacgccctcctatctgatattgtcgagataccagttggcctgataccaaatctcgatatctctcatatcgtatctgcaatgctcgattgtgaataatccacccttgccatcccgtccgtagtcacgatccaggaatcgccgaataacatcgatggcatgagctttgtcgaatttggaatcatccatggaacccaacccaaggctcactatcatatcccaaaaccactgacctgtccgattaccgatgtcaggatcatccatgatgtgctcttctaagcgtatagcaagggcaataatcatttctaaaacactgcacggacgattatccaaataacttgcaatcatactatcccggtatccttgctcgtttccgaatctatatcgaagatcgatcccatcgtcatagcggttgccatcaagagcaatcgtatacgtaaaatccgtatcatgaagcaaaaataacaacttacgatacgacaaacctcgcgaatattcatcgtcgcatacgagctggtacatccagtcaaaatatgcattgttcagctcatcccgtgtcattatacctccatctgatgcggcatatcttcaaccacttcagaataggtcctctgatcaaggagaatttcgtaatcacactttcttgcgtcattacgaacaaagacagagtcgtcctcatactctccaaaatgattcaaagaatcaattccaacagcatcttccacatcttcaattacttcatcgttttcatcagccagtacaccatctgcatagtaggtaaggctgatctgctcatactcttcatcgtcaccaaactgctccggcggaatcacatacggaccggcttcagaaacaggcttttcttcctcgtccgaaccgaaatcagaatatcgggtgtaaccctcttttttcagacgttccgcatactctttaagatctggtttttctttgtccgcatctttaataccttcagcaacggttttctttacggactgatcctttaattcctgctcacgtcttaagaaaacctcttttacagaatcaatttcctcctgagcgagcgcttcgtatttatccttaagcaggtaccatgtcactactgatccagtcgcagcaccaatgataaatgccaaagaaaacagagatttgttactcatcttcgtcctcctcgttctgaattgtcataacggtaagcgcaagcccaccgaaaagtaaagaggcactcaacagaatgccccctgtgatatgtctttttcttttggtatccaatatgtaatccatcatggatataaaatttccaatgccatccatcagtgatgctcctttccgcccataagaacggccagaccactaacaaagcaaataccagcaaatgctgaaaatgttaatcccataaaacctgtcataattcaggactcctttctattcatagctcgaaaaataatggttacctacttgaaacatcggtcttccgtattttccatattcaccagccgtgaagaatatcgtatctacattagttctggagtgcaattcctcttcaactaactggcaaatatcatcgtctacaaagcacttatcaattctcccattccacatggatgaaaactgatttgcttgatatacaacaccgtacactgtatccgggaaatatacggaatcaacacgatttaatatggtgtcgatcactaatcgctttccttcctcgcattcgccctcagcttctgccatagttacaagagcaatcagctcaatatcttcccgtggcaatagtgtatcctccacatactcttcgatttcaactgccgacaccgtttcctctaagggttgctcagaaataattacaataggatcaataggttcagcttttaaagtcggctgtatttcgatatattcataccggtttacctgttctgccgagcagacaaaacctgtgcaaataatcgcaaatacgcaaagagcaggaaggaccaccatacgaatataatttcgcatatgtatcctcctcaaaaaaattagatcagatcgagaatcggtccgtctacattgaactccattagaatggctttctcgtaaccaccatcctcagtttcacggttggtctccagaatcccgaaatcaacgaagttgtcgccattttcatttccttccggtttataaacccaaccaacaatctggctcattttggtacgcttaatgccaagctgatcgtatacatcgctgaggaataaatatccattagctttaagtttgtcgtttgccagattctgctgagagcgcagatacataaggttgtaatccatattggattcatatgcctcgcaggactcatcaaagaaacgggcgtaatcgttcgtagaaggtgccgccacatctacggcggacttcacctttttttctttaccgctgtccggatcagttacagtttcctcaaatttctttgccttgatgttgtagcgaagttctttatcaacctccgcaccaaagcgttcaacgactcgatttctgtattccttgaaagtcttatccacagtcgcataggctgctgccagtgctacatttctcttcttgagaatattgtgagacgcaacaatacttgcgatggataaagttccaagggcaacagcaggagcatagagcttagcaacttttacgccagcctgtacataaacaatagccaaatctttctttgcatcgtccttagaatactccgtcgccagttcctcattttcagcacatttgtgaatagcatcaatatctttcttggacttctccaatacgctgtctaacttagttgttgcatggcaagccataacagcacttgcaacggtaccaacaacaccagccactatcagaatctcagggctatgcttcttaagtttcacacttactttgctgaaggtcgtggaaacgttcttcatgatttcttctttcttcatatcagttattctcctcttcaattttttctttcttcaataaatgatcgatcaagtgctgcgtgtaccacatgatctttttcaaatcctgaattccgtttttatttttccagcggcacgcatacttgataatgttaccagtatcggttgcttcgataccttttaaatcgaaagtgaatgcctcaataacatcgatcacttccaaacctgtttctgactgataatggctcggatgagacaccattttatcgtctgattcgtacataaatatccctcctagttcaacggtaatgccttcggaagtttaatcatgtatccgtctctcacacgaattacagatgcattccgaatatcagtccagccgtatttattgtctgtatagttgccagaaacgccaaccagatcatagaaatcggcgacactaactacctggtatgtggcaataagctcgtccattctttccaggacatcttccgcctcgccacgagattccagaataatatcatcataatcgtatccagttcgtgttcttgatacgtttcccgaatctcgtcgatcccgatcgtcataatacttacggtaagagatcttggatgacgttgacgatctcccgccccttgagtttccgctaacaccaaggaatgctctgacagcatccaagataatgtcttttacggctggaaccacgatgtcttcaaaaatatagctttttacatcgtctacatcttccggaacaaatacgttcgtaatcttctgaagaccattctttttctttgatttgacagaaccactgacaaccttttcaactcttttctccggaatatcatcattctggttctgtcgtgatttatgggaattggatttgtattcctccatctctaaatctcctttcaattaaccgttaccacttttccggggagggttatcctcgtacttggaatacggtttgttttcttcttaaactgatacaccagattactcctggctttcttttcagacgccgcgtatgtagaaccctgccatctatttgcaacgcaggtatcaaactccataaccggtccgtcgtacatatactgattcataggacacctcccttaaaaagcaaaagggaaagcaccctgttataggtactctccctctgtccgaatcatcgattcaattcttattcagaatcctcttctgtctcttcatcgatatccgtaaactctccgtcgacgatatcgcccttcggctgagttacaaccgtcttacgattctcacgccagttcttgaattttgctgtggccggaacgactacaaatttgtaggttaatgcacctgcaatcatagccaatccgatagttgtcgctttcttcataccgccgttagaagccgccttcacgatctcctcagtagttgtttcgataacctcttcgttgttgttcatgatttcgttgttctccataatatgttctcctttcagatttgaaatatgtggttcttccataatagtgtttgtaaattctgcgaaccttacattaagttgcggaagtcgtatcttggaccatatccatagtcgataacaagacaaggtgttccgtccgtagcaagctgagaactgaatctcagatcgatatatccattatcaatattccagccaagatcatcaccaagcttgataggctctaatccaacctcataatagaaatcattaagtgaaatatacatttcatctcgcatttgacgatttaattcattctcggcctttttcaatttgtcgatgtctgacttaaaatatcttccggacacagcatcaaaacataaagtatcgccttttgctgtgacgatgacctccttattttcaacaggatttttctcaaggcgttccttagcaaccgcgtccctcacagtctgttcctttttctcgccgattgtctctactacctttttttgataatctctcaacgttgattcggaaatggtgtacgctgcggtcagtgccgcatttcttctggcattaacggaacttgccccgataagacaagctactgatactgttccagtaactgccgcgggaatataacatttccaagcagttttaacgacgtccatcggctccagtttatctgcctgctgacgtcgcttttcctcatccaataattggattgctttaggagtagctcgtactgccattacggtagtcgtaatcattccggcaattccaactccagtgaggatttcaggactatgctttactgtagctgtttttacatttctacagatcttagtcaaattaggtttctgcatttcagtctatcctccataaaatataaacggggcacaaggccccgcgatttatctaaccaaccagaattccggacgaactccactagagttcgaagcagcggtgcagaaagtacggatcgccactgtcgttcacaccggcaaagtaagccgaagaaaattcctttttagtagcattgcggagccagccgaactcacaatcgtttttgtaataagcaacgcggtttcttctctgtttcataagaggaagctgctcatcgccatccgcttcgatgtgatctcgatcccatttatcggcccagccacaaatctctccgagagtcgggattgataaaccggtcattctctgcttaagaaccgcagggaacatattgtacagctcgctatcgatccactttttcagatcggactgagaatatccgccagcattgccaccatcttcattcatcgggcgtttggcaacataatcgtcgaaaatgaatagcaccttattgttcgtaactttctgaactgttgctgtaaagtttccgagctttcctaaaggaaccatcattttatcgccaactttaatgtctgctggaaggatagaatacggattatgtaccgtatctctaaataaattcaaggtcgcctcaacatcagctctgcaatagcgaactgtatcgccaatatcaaatgtcggaaataacggtcccaaatcgatcgcataacaaccctctgattttcccttttcgtcaagatcgatgtactttctatacatcctctctaccgtcggaacatcgatgcctcttttggttaagttgataatttcttctcctaatgtcatttctcttgtacacatagtacgttctcctttcagaatataaaatttttatttggtaactacgaaattagcaggtcaataatccactcaagcatatctttcgcacaagaaaaaacataacttgttcgtggattcacacatgaatatgaatcacattcatctcgaaatgattcaatcacgatcagcggtggtatctctgggtgtttgcagagtcgtattaacacttctcttccagcccatctcatataactcgcctgctcaaagttatatccacgctgaaccacgggcattattgcgatagcataacgtacagtataaatggctctttcagtcggcgattccatttgtctcctccaaaagaaaaagcgaaagagccttgttaggactcctccgcttcatctttgtctctccgggcaagtgcttcactgaccttttcttcaattttctcatccattttctgttcattcacccaatcggtaataaggtttacgcctacaccaatcacggttgctgctactccaatagccttaatccatttacttttattgctcataatgacactctcctttcataatacagcttgtaatttctgcgaatgaccagatttattcagaatcccagccggcatccggaacccaatccatatcgataaccaatacttcaagtccatcatccagtgttactttggaatggttaaaatcgatccagtatattcctgtatcaatactccatccaaccgtatctcctccttctaaaggctcaagaccaagcagttgataaaaatgattcgccggtaaatatccgctgataacaaaatcacggttcaaatgatattccgcctgaataactctgttgatggaactttcgaaatatcgattggaataggcatcgtagaataacctttcgtcattcggatcatgctcatcaaaatcaagtgaactgtttctaactaatccagttgaagtaatatacacgtccttagccttttccgctgcgatagcatcaactatcttctggtgagcctcttcgccgtacaattcctttagcttatccttatagttgttataggaatcattcagcaacgcataagcgctggtaagtgctgcctgttggcgtttactcaacacattggcaccgaagatgcagaatatcgttgccgtaccgctaattgctgccggaatatagcagacccatgctgatttaacagcttcaagtttgctataagcctctggatcaccgtcgtgatttgtcttactatccgctctgattttacgaagagcttttggtgtcgcacgtacagctaataccgacgttacgataaccccagccgcaccaagaccagacaatattgtcggtgatgcttttctcagatagattttcgacctctgagcgagtctttgaagatttggtttcttcatcatgttctcctttcgtttttatttcatagcatgtaataaatctaggacatctgtggatatgtccgctgctactgaaaacataaaattgttatccggattgatttttgaaaactgattcattattcgccggaagtcaccaacaaatgtgatgaaatcttcaaccgatccagatttctttggataaagtctaccgacgatgtatcttttcaactcatcaatagcccataccgaatagctcgatttttcaagctctttcttccatttccaaccgaatggaaaccacgcatccatctgatacgtatcgcataacaataagtcaagttgttcgatagacatccgttctctcctttctgcaaaaaataaaagagaaacaggatggactcgaaccatcgacttcgggactttaatcgtctcgcgctctaccaactgagctactgtctctcataatatgccttgtaaattttgcgaagtaaaaggaaagaggcgttgtatgcgcccctctcggttaatttaaaccaatgctcttcaagatactcatcagctcgtctttatcgagttctgcatctacatccaggtgaagatgagtctttccatcgtttatagtagtaatagcctcgttcaactgaatatcaatgttgtatcccgttttcttacgtattaccatctttattgctttggaaatgattcctctcgtgaatttcgatactattctcatttcatccatgctccttttactcctttcaaagcttcagtttttcataaaaggaactgttattttggcgaaaaagaagagacgttgttagcgtctccgtctcttttgggtatgtaactcataaattcccaaggtcaatacaatggttgctattactatacctacgatggcaacaatcataccaacagcactccaaaatatccacgccgtcaaagctccgataatactaatcagtaaaatcgaactagccgtagcgaaatacttaagaacaccaatcgcataatcagttacttttccgatagatacataagtttcaatcatttttctttctcctttatgtgaaattatttagttccttttccataaaagtctttgtaaaaaatgcgctcaaatctcacgtctatcgaaacacgtttcccatcgctgacgctgtattggtttcatttttaacgcccacattatttgtcttatagtgaccgttggatataatccttccgtacactctccggatcggctgtcgaaatattccttgaattttggatgtaaatataaagagtctgtcagccatgaatcgacctctgtccaatatgtactttttgtatctgcactaaatcgctgctggatcactgccagacctttattccctatcgtaaatagagtgcagcgatcatacacaggatgattacaaatgtaaagttcgccgtacattgacaaataaatgtctggcttttgataatggtaccgcatttctatctcctcatagcaaaaagaaaagagccttagatttctctaagaccctctcccacttagcttatgtttttaatcgtctgaatcttcctcggaatcatcattcgcaatgcccaatacttcttctctggttgggtataagttctcatattcttcattgccttcgcggccgtaatcatctaaatctatactgtggccgcagtggggacacaccagcgtatcttcccactcatcctcgaactccattaaatgcccacactcatgacagatatactctctgctgaacattgctttaatttgctcctcgttaaaaatactcatagctaaatatctcctttcgtactgtccagctcccatacatatagtatacaagctgttgtctgtagttcaagagataaagctttattctctcataatagcccttgcatttttcacgagaaaaaacgaagaggacatgcgttacacacgtccccaacgtttcagaatttcctctctacttctttgtaggtctaaaacggttgattaaccctttgaatgttgaagatgtgaaggttccagtttcttcaaacttaaatcctttattcatccagatgccataacacatcaacggaatcaataattctgccgctgcaataccaactctgaaatatcgatccttaacctgctctgcgatctgccgctctttgaagtcgccatctttcgtaacagactcttcgtccatcatacgccgattgtacttctcatcagcatcccacacactcttgttctcttcgattctcagcttgtaaagctttgtcagatcatcaatcgctgttgatttttctttgcttccggactgcaaatcagataaagcctcaatctgtgctgcaatctcctcacttaataattcttcgatgtttttctcttccatttcgttctcctttcaaataattattaggttcattccataatagagagtgttatttgtgcgaaatataatttttcagctccactcgcaaacgtacgtaacgctgcttataaattgcatccgcgccagaccgatctaattcgagaaataaataaggtccgctatctggatctgattcatcgaccctaagcgaaccaaccggtttttccctgaatataaatcgagacaataacactccacccattattccgatcagtaatccaatcatcaagctcacttctgctcctccttccaaaatgtttttctgaaaaataccacccggcaatttttcaaatatcaaaataacatgtttcacggtaacctacgtacggtatctaacctaggataaaaagaaagagccattgctggctcaatctttaaaagttttcaagtattttgtaggtaaatattcttgttttcttaagttcattcaataccttaattgcattggaataattactttcgccctctgtccaccaaatagtccagcctttcaaacgagccaaaacatatcgaagtccgaaatacttcaaagttgttttgctccaaaccaactgatataaatgtggaacgaaatatccagttttagctccttctgcgcctttaattgcgataaacttacacatatcaattccctcctaaaatatattcttttcataaagggagttgtaattattgcgtgttctcaccttcgtacaccgttttcttccgaagatcagaccatgtaatataacggtccttcttgcatactgggcaaaagaatttgctaatcttcccaccgatatcctcaaattccttactttcgccctcaagtcggctctggcaatttggacagttgaaccggtataccttcttcacagctttatcgacaatcttcatatcatttccgctccttgttaagtaaccagaaaaatcgtctgtacaattcgtagtaaacatccttgcagcatggaatttctaatctagctttgagaatgtcataggaccatccctctgttacagcttttaaaatatactccgccagttctcgatcagtctgctctgcgactctctcgaccatatctgtacgctcagaataatatgtcttagccatggcgcattttgcagtcggatcaccaagcgtactggttactacgaacgatgccaaatctttcggcggattagagtacccatcaagaaccgaataagcttttctccagattggatactgaagacagaaatgtttaagctcgtaataacggtgcttctctatccaataaggattcttttcggatagctccggacgtattgttgttcccattagcgcttctcccctttccacacataaccagtctcctcgtacaagcgcttcggtgaaatataaaaattgatacgtccgtacttagaattcatgtcctcaatttttgtcactaactgaccattccttgtggcttttccgattggcaaccatccagatataataccggccctaacccatgacgcgtctttgccgtaaattcgtgccgcaaccattaccggaaccgagccagttgcaaattcattttcattcattggctgctacctcctttcaacggctattctaggttaggaacagcatttagtaaaaacaacctcggtggatatgagcaaaaagaaagaggctttgctaagcccctgttctcattttgttaaaccgtagtttctgtaaccgaatacgcattacagtcaattcctttccgatgttttcctgctgacgataatccttacttctcaaaagcatatcctcgaaaaatcgaattttattcagcagatgtctttcttctacactcatatcgcacctccgtaaatatgtattctattcataaaagcagttgcgatttatgcgccttccaacgtatcatagtcatctcacatggataatcttcatatccaaaagtctcgcaagtgatcagtccctctataacaccggctattatttccgattcgtattgcttgtatgggtaaatataatctgggagataccgatgtatacatccgcattcggagcattgatacctcggaacattcacccatttgctcacacgacctttcgtccgtacaattcttctaactttgtcatagtatttcaattttccaccgcagtcctggcaggttgatgtattgttactgatcatatacctaaccctttctatcctaggttaaaatataaaaatttagtgtaggagttgacaattcctacactatgatatatgattactaacgataaatcaacaatccaacataaaatctcggttcattatcatgaggagggatttaatatgctgatacaatgcccggagtgcgacttacaggtaagcgataaagcaaatacctgtccgcattgtggatacccgctgaaaccagacgcaaagcccaaatcgtctcgtaaaccaaataagcgcaggcggcttccaaacggtttcggtcaaataagtgagattaaaggtagaaatttaaggaaccctttccgtgcaatggttacggttggaaaggacaagaatggcaaaccaatatgtaagccgttgaaaccggagtcatactttccaacatacaatgatgcatacacagctcttgtggaatttaataagaatccgtatgacctggaaccgtctatcacagtcaaggaactgtacgacaaatggacaccggaatatttcaagactctgaagagtgacgacagcgccagagctactacatcggcttggcaatactgctctgctgtttacgatatgcgagtcatggatgttcgagcaaggcacataaaaggctgcatggaagaaggtgttgctaccgtaagaggccaagagcagacaccaagcgcatcaatgaagaataagataaagacgctcttcaatcagatgctcgactatgctgttgaatacgaacttgtagatcggaactattcgagaacattcaagcttacagacgataccattaaagaaatacagactgtcaagaaagaacacattccattctctgatgatgagatggctcttctgtggaagaatctcggacataaatatgggattgagttcatgattattcaatgctattctggatggagaccccaggagttaggtctgatagaattagcagatgttgatttatcgaactggacatttaaaggtggaattaaaaccgatgctggtgaaaacagagttgtaccgattcatcctcggataagggacttggtttccaaatcatacgaagaggctgatcaacttgggagcaaatatcttttcaattatacagatgaagatcgccgcggtaaaaataccaagttgacatacaatcggtatagcaaaatattcaatcgcattcgggacgagcttaaactcaacccggatcatagacctcacgacggcagaaagcatttcgtaaccaaatgcaaagatgctaaagtcgatgaatacgctatcaaatatatggtcggacataagatttcagatatcaccgaaaaggtgtatacagccagagaatttgaatggctcagaactgaaatagaaaaaataaaatgacttgtatttgacgctcaaatataggaatagcggtataggagtagtgcaggaataatgtatgaattacctacattttcccactttttactactcttaaccgcttcataattccttgattttactggattttctcggtataagccacctaacaagtttctattaataatttctttcctatttatttgtccctcactaacaagaaattgtatcgaaattaaaacacttcgacaacttggaaacgttcaaacgtgataggtgtttgatctgtaaaagtataaccgcgattagctgcatcccgtgtccaataacgtatatttcccgccttccagtgttcaaagtcttcatcttcaccctctagttttaccatatcccaggttaagtcgcaaaaattgacagtttccagatacactgtcttgatcacacaggctggattgccgcgtccatcgagcaccagtgataaatctcccacgcttggggcctgctcatcctccaatataaccgagactgttgcagttttctttccggcaagcaccagcgctaaaagttcgtccgccatttcaggactatcgccaaaagcaaagcattcaaaataatctttctttgtgttttctatagtatccattccttattcaatcctccataacttttaatttaccgttattccttttccgacaggccggctttattcaatacggcaccctcgtctatgtccgtttcatcgataatatgggacacatatctgtcagtttctctgtaaacacactaccacttatcataatgcaccatggctgtttcccatctgggacgcaattccttttcctcatccggccagccaaatgcgatcacagaaataggttccaccttatgggggagtgataattgctcaatgagcagctttcgccaatcggaattaggcactaccccacaccatacgcctccaagacctaagccatgaatactgagcagtatattttgagcagcggcggcacagtctgcatacaggaactcctttattccctccctggttttatctccgcagataataatggctcctgcggaaatctccagcatcgcagcattggaattatgccgggccagcatggatagaacacctttgtctcttactacaataaagtggtatggccgcttatcctttgccgtgggagcacacatgcccgcagaaagaatggctgttaccatatgttcgctaaccggtttttcagtaaattttcgtatgctctgccgtgtttttatcacggtgagcacgtcctgatcgcacttgatatcggcggtcttatcaggaacatttacagcagccggcagatcttcggagaacatcgtaatctccgcagtcatttcctgcccatgaaacccgatggacttttgcatcgctttatctaaaaccataacaaatttgccgctgccgcgggacaacagtttacttcggtattcaatgccattcattgtaccgcttacataaatggttcccctggatttgtggaatacttcttttgcattgaatggaatttcgacgatagtcagccggccagaatcgtcctttttgatttgcgcatcaaatcgttctattgcaatcacctcccgtgtatttattttttcgaaacggcttttgatgatcaggaaagagaaatacaggagcccaaccgaaacttacatcattccgcataagaatgactcatagtataaaattcttcccggcaggtgtctgagcaagcatgcgccagtccgacggtcacgtcctctctcttttctttttccccggaattaaactgggaaaaatacctgctttacagcctgcaatgtgaaatgccataaaacataaaaccgctgcaattgccttaatataaatggtatactgctcatcgtagctctccacgctgaccaaaccagatccgctgttcctgttcatgtccagatagaaatcagtccggctcagggcgtcagagcgttcaatcccgttgataaattcaacgtcctttgacagatccgcttccaccacctttccaactggcatgataaagtagtcctcctcataattctgctgcactgcatcgctgttgatgcaggcggccacccgctcgcctgatggaagttcaagattcatcagatagatgtcaccgaagtaatctgtatcagcagtcaataaagaaccatattctacttgaacggtaaatgtattgtgagaaaagagttcctccacattttccacacggtaaacatcatctccggcttttcccccaatatcaccgtctgacaccatgtgcgtctgcgtatatctctgatagagcatggaataaaaaacaggcagaattttactgattcccaataccaccaacgaggaaagtacgatacatagtaatacatcaaatctaattttataaattctcatttcacacctgccatgaggccgtcctttcataatacttcctgcgcccagtacttttcgatcccggtttgtacctttgacaaaactattttgattagttaaatatataataactaatcaaaatagttttgtcaagtcaaacaaagtgccgaaggcactttgttcatcgtctgttttctgtgccttgcttttgcagggctatttgtttacataattcatgatttaaaaggaatttcctaaaaagagaaaaaagagacacgattgatttcgtgtccccttttgatttttgatgtgattactcagtataagaagctgggggaacgcactgcccggcactttcggatgcatcgctacaatgattgctgcattcctccttaatttcggatttttcagcggtagcaccagcgtcaggcaaatccatttccataatctctaactccttcttcagcttatcgaattcttttgccaattctttaaagtcttcactgtagtcggcaaaaacatgccgcacaatttctttcttatgctgcatcatgaacttatccatcatctgttccagttccgttatgtgttccttttttgcgttccgttcaatttccaacagacgttctgcgattgaaaccggatggggtttcgcaaccacttcgtcttctcccggaacgcggcataaaatgaaacgcagtttgtgtgcattatcttaaatctcctctcaaatatctatattttggttacagacaaattatggtacagcataaacgatgataagaaattatttatttatattttcatcataaaaggagctgatggtgagtcagcttcttagtgatatacaatcaaatcgttcatagaaacattaaacagaacacttaacgcaagaaaattatctaacgtaggaagggaatccccccgcagccacttatagattgcgttggtcgttgaaaggccaaaatactctcttaggctcgcaacgctgaatcctctgtctattctgtatgtgttaattctcgcaccggttgcgaccggatcaattacggggtaactcattaccgtatcctcctcataaaaaaaatccacctgccgcatggctggtggatggaggacgcaaaaacttttagcgatgtgtcagatacctctcccataccatagcggcaataaaacaaagcgctgtttacgagcgcgttcttcttgctgtttctggcattttcgagaatccatccttaacatctccttatccttctttcccatttttgcttatcgacatcatactatatcctgagtgcttctgcaagatactattttcctgtagataataatttttcaaatgcgcgtggcaggattcgaacctgcggcagccatcgttcgtagcgatgtgctctgtccactgagctacacgtgcaggagtaaacagggatgggcagatttgaactgctccagtcagaggtcaaagctctgtgtgctgccgctacactacttccctctaactgcggataaaggattcgaacctttgatctgccggttcagagccggccgctgcttccaactgagctaatccgcaatactggcgtctgagggaattaaaccatcccatcataacgtttcgactaaagtctcatatgatcccaaagggaatcgaacccttgtttccggcgtgaagggccggcgtcttagccgcttgactatgggaccttgaaatacaggtgacaggacttgaacctgcgatataccggttaaaagccggttgccataccacttggctacacctgcagaaagcaccgtgctggaatcgaaccagcttcagacagatttgcagtctgtccccacgccgcatggtacggtgcatactgtgcttcgaatccagaagttatgcacaaaaaaaccgcctatccattacgaataagcggccttgactgaatcgaattcaccaacggcatcagggaatcgcatacgacttccatcctctttcacccattcttaatggcatcacaacaatacgctgcctgcaagcgcgttctttttgctgtttctgacataatttggaagtattcatggtagtcatggcgtttctcctttcgcttatttcttatgaattgattatagcaagctatatttcagttgtaaatctactatcagtagacaaatttggccaccatatccaaaacaacttcctgcattggcgccagttcacttaagttctactcaagcctgctgataacctgctggtcgccagtataatgttccttcccaagagtcatttgctttttaacctcttccgtcgcttttttagcatcctctatggcctgcctagtatattttactaaatggtaactaaatcccatagccaacagttaatgcgttctggtaatagccgggactggtgtgtggttataagtatggatggagttcaaatcttcatggaattttcaaacctgttccgtatcctattgctatcaaccacaagaaaggattttataagatggaaatgattttagaaaccgcagatctctgcaaaagtttcaaaaaccagatggccgtgaacaatgtatcgcttcatattaattaaaaggaattccgtctatgggctgctcggcccaaacggagcttgtgaaaacctgaaggcaagaacgcttgcgttgtgcctgccggcctgccgcattgatgaagtgctggaaatggtgcagctccagaatacagggaaaaagaaaacgcgactggggaacacacgggattgtgtccgtcagtcacgttcatttttatagtgagaaggataacattcggcaaattttacttttctttcccgtcccacactccattttcatctacatagcgtccgtccggggccttggtatttcggaacaatctacctcttgtgccgtccggctcttcattaaaataataatagctgccatcaatgaggacccagcctgtcatcatacggcccttggtattgtctgacaccggatttagataataggagccgccttggctgtccgtataccaccccgtcaccatataaccgttcacatcaaacataaaccagtcaaacgcctgctgaccggcgctcaagtctgcatatggattataagcagctacccatgtattcacataatcactgccatctgccctgcgcagtctccatctgccgccctccgtcatgacccagacaaccttttccacatagctggggactatgacaccgtctatatttttagtcccgcctgtataattcttcggcaggctttccttggggccgctgtttccgcctgcgaaaccatgaccgctgccggaacctcctccgccgccagacccgccaccgctgccggaacctccgccaatgtaagtccaatgggcgtaaatagtgcagttttccgtgaatatgagtgtagttgttactttaacaccgccactggcggccgtaaaccagccgtcaaactgatagctgccgccgcggactggagtcggcaggcttcccagccgcccgtccgtgtcggttattccagtggcaggtgtcacactgccgccattcgcatcgtaggtgatcgtgtggttcgtaccggcggctttgactgtgatcgccaatgtggccgtcttagcaataccgccctcagtgtaggtgaccgtcactctggaatcagcctcagtcaatgcgccggacggggttactgtatagcccgtcaccgcacgggtggaaccatcagaataagctgccgtcaccaccataccgctgctgtcaaaactttgccccgccgtataagtggttttggccggcccggttgtcacggcgatggaagacaagccggccgctatggtgattgacattgccttcgtatcgctgcctatgtcgttggaggccctgaccgtaaaatggctgattcccgccttcgtagggataccgctgatcttaccgctgccgtccaatgacagtcccgcaggcaggctgcctccgctctctaaagaccacgtggccgccgcgctgccgtcagccgccagtgtctggctgtaggccacgccgattgtgccgtccggcagggtctcggtgatgattgcaggagcagcttttaccgtcactccgggcaacgtgatgaagccattgtttattccgctcacgtcgtagaaaacgcctccatgaccgttctgtgtactccactctgccttgaccgcggcgggagatacgtcaagatctgccgcggagcctttgaggtacgtcgtcttgtctccggcccatgtgatgatggcggcagtgccgcccggaacaggctgtgtacccgctgttttgattgcgctgcctgtactgtccaggtctttaccgaaaatcacggcgctgccgccaatctggatcccgcttgatgaggaattgtcaatcatcgcgtaaccgccggtgtttactatcttgcttccagacaccacgacagttccgccttcattcatgatgcagaccttcttcttaccatcagcgttgatggagccatctttaacagtgatactgctgttttcctcgttgacgatgcctacgctgatggaggtgcctttaccgccatcaatcgttccgcctgatacaagcaagctgttgggagagtcgttgagtataccacaggtattggcaccattgccgccgctgatattgccacccgatattacactattggtactgtttttaaacacgataccaacgttttcgacagaaccagtgcctccactgatgctgcctcctgatactctgatttcgccgcttccttgaatgccgtagctttcttcgccgcctccgctgacaatgccttccgatacttcggttatgccgctaaaagagttgaatatgccatagttctttgttcctgtgcctccgctgatcctgcctccctggatcgatacaaggccctccccaaaattatagataccggtactgcgatccccgccgccacctctgatgctgtcgcccgatacaaggatgctggtattagcagcggcgttataaatggctgcattatctatagtattgtaactggaaccggtatggttcttattagaagtggaaataatctcgccgtctgtcacggaaaatacagaatccgtgccagattcctcaacgatcccaatcacaggttccgcactgctcgttaaaaccgcccgccactctacagtcacattttccggaatttccagttcgagtttatccgatgcctcggtggtagtttttcctgtcacgatcacgtcaccgctgtactcgtccacttctgccacaataccgttgccagctgcccaggtattgatatccgcaaccagcctttctactcctgtcaacgtcaatgcccgcgctgctgctgccggggatgccacgcttgcaagaccgccattcttatctgctccggcgtttccatccccctccgcgccttcgctgctattttcctcctgcctgtacccacagtccaaaaccacttcataacagccttcaccatgctcatggtcacaaaccagttttttcatattgctgctggttgcggtctcatccccctcatagcagctgtcatcatgctcatgaaggcaatgcaatttcttcctataacaactttcatcatggacatgattactatcggattcagcatgggctgtaaaagcagtcatcggtatcgaaacgcagagcatcacagctgacagcgccattgaacagagccttgcgtactgtctcttattgcttcgcttcatttattgttcccctttctgtgtactttctataataaacgcatccgacgaatgcggaaccccctcttttctatattatctacttttttctcaacgcgggctgcataacgccggaaacagattctttaaagtcatcatgctcatgatggcagttcaggaacgattcggcactggcaggaaaaaacgtaaccgcaaatgcaacaaatagccagggcccgagctattatttatcgggcaaaaagcttgtgaatgtgattccaggtctagccgtccatatccatactatcacagtttgggaggcttttcttgtatgatatggtagaaattgattccgcaaaacgacctggtattttaatggattatttaatcacagattcttttgtctatcacttaggagtttttcattatacttatttagaatctcatagatgaagaagttccttaatattatcacctaaagccatatcagcaatttcctttgatgggctgacaaactcaaccaattcccggtaaagatatggatctccatatggcgcatcggaactaaacaggcatctttgaggcagttcaatcaatgccattctggtagctatcgatgcaaatgctgcagataaatctaagtacgcattcttatgtgcttttgcgaactttataacctcaatccaatttgtcccgcctaaatgtccaaagataacaggaacttgaggatatcgttcgcacaaatccatcaacagttttatcccttccaatgtgacaggggagaatgtatgcacccacacaggacagatttcagtagcttcaatggcctgaaatacggtatctaattgtaaaatctgctgctcatttcccggtgtgaattctccaatgcccagcaatgaattggagatgatatagtccgttatccagtcctgtgtttcattgaaagacattcctaacggtaccgacccgaatcccccaaaacggtccggatgctttctgataatggaaataagctcggatatatttttctgttgccgaatgatatttgcttctatactgttggatccggataaaactttataaagctcatccatttctgtttcaagcgcattcagtgaagaggctttttccggatgcggcgccgtgcagaataggattgttttatcaattccggctgcgtccatcatctgtagctgcatttctgtggggagcatcatatgctcatgactatcaataatcatatctcaatcattcctttccagcagattttctgctataatcagagtatcattcccactaaaaaagcacaagaacgcactattttgatatgtagtatcatttttgatacttaaaccagaggaggtcttacaatggcaaaaacaatggaagttccagaacgatgtcccatggatgtgggcttaaatatattaagcggaaaatggacactccggatcttgtggcacctttccaaagggccagtccgtttcaatgagctgcaaagattattaggtacaattaccacgaaaacattaagccagcagctccaacaattagaagaacagcaaatcatcctgcgtactgtgtatccggaaacgcctccaaaggttgaatattcattaacggacgtaggaaaaacaatccagccagtcttaaagaagctatgtgaatggggaataagttatcaaaaagcgatttcagctataccatgattgcccttccacgtttcttatcccactggtaaaaatcaaattttgtgtcttccatctttatggaaatgttttcacgcttatgagcggcggaacaaggaaaaccattctgtctaacctctgctatcgcttaatttgttttgttactatcgtttttttcatgaagctttcttatcctttcaatggtggccgtgataagtgtagatgtatttgtctggaatcacatcaaaaatccaatttttataaagcacaagtctattttctaaatctatctgctctttttctcaaaacggaacgtataacgcccataaatataatccagggcagcaatgtcaccgaacacaaaacaacgataacgcccacaacccagtttgtttcggaaacagactctttaaaatttttagaggaaaacgaatactccgaaggatcttccggatgataataaaccgttttcgtggtgccaatccattcctgggattcctctatatccctttggtagctctgatagtcctgaaattcccggtgattccggtccgatgcatggtaggtgataccatctacctcataggaataattgtagatgatgtaatattggtccttatcattcggcctgccttccatggaacggtcaatctgacttctcgtgatctcatgtccgacactttcacatgttgctgtcgtctctttgtactctactctcccaaaatcaaaagcctttcctcctttgaacaacaggaataaatagagcgcaatgatgataagcgcaatcggccaaatcagggaaaaaacagattttccttttttcatacagttcatctcctcatctactttattttcaagaatgtcatttctgtaaaaaccccattttcatcagcatggaagccatcaggggggcatattcacgtattcgctgccgtctgaaccgccggggctggcctctcctggtcatactatcacatttcgatgtacttttcttgtatgatatggtacaaatcagtttcttaagttccccgataagctgcccggcatgaatcgcacaaagcccattcactccgcccttcacgaatccggtttcaattccagatgatagaccggactttttatccacttgtcatctgaccgctatctccgccatgccattgttaaaccttcatccttttcgaccattttcggacagcaaacggcatacataaaacgccaatcatcacaggaaccgtaatcagcaaatagggtgaccagatgagtttgccaaacacacaaaatgtattggtcctgaaaatatcggcggagcttcccacgagtggcaataaatcgagtgctttctgcgccccaaacggaaggtagcctgcaatcatcatcgggccataaacggccgccagacttagcagcagggaaagtacattgcttctcaccgcagctgataaaaacatcacaacccccgcgtacccgattgctccaagaagtgcaaatgcgtattcataaatttccgcctgcagcatattgacaggggcaatggcaatcagcttaattgtttgaatcggcatatcccatccggaagttcccatgtagaatatctgtgttaccagatttcccgctgcaagaagtgcaaacagttccacggtaaatgcgactccggtaaaaattttggcaagagcgagcctttgccatccatttggagttgttaataccaatgtgcttgtgcgatcggaccattctcctgaaaacagggacgacaaaacaattgcaagaaacagcgccatcaccatcccgatatcagcaagcatgcttccaagaagcacggaccagccttccgtccattcataacgcagaggttttcccacttcctgttccatctgtaagagatactctctttctgtgcctgtctgaccgttcacttccaggaactcgctgattacacgctgccgcctttcataaaaatctgccagtttatcaggattcacatagctcatcatgattttatagctgtttggatccttaagctccggatacagcatccccagccagttgttgacaatgtgccagtctgtatgttccagttccttctccatgccggcggcttccatcctctggtaatcccgcactaactcctgcagtgtttcatcggtcagttcccctccaaaggaacgtgcatattcctggctgccttttaccaccgcgtatccatcaaaattgttgccgaaagcgcttgtatgatcaccagagcttccaaagctgaaccattggaaggaaagtattccgccaaaaaccacgacataaacaaaacacagcagtacgctgattttcgtcagtcttttccgccacaatttcttatgctccaacaaaaataaattcatattaccgatccccctcctccgtctgaaaataatacaggtaaatatcttctaatgctgcttcgcatggtatggcattatcgccaggccgatcgtcggaaacaatacgcagcacgattctgttttcttcatgccgtaaattagccacggttgctttttcctgccatttcctggcctcttcctgggaaacagaaagttcccacacttttccgtcagctctgcgggtcagttccggaacggttccctgcattacaaatcttcctttctttatcagcagcacttcatctgcaattgcttcgatgtctgacacgatatgggtcgaaaggattacgattttatcttctgcataatcggaaagcagattgcggaatcggacgcgctccttcgggtccagcccggccgtcggctcatccaaaatcacaattttcgggttattgagtaatgcctgtgcaatcccgacccgctgcttcatgccgcctgaaaaagttttgattttctttcctgcctcctggctcaagccgaccacctccaaaagctccgccgcacgcctcttagccatgcgctttggtatccccttgagcgccgcaatatacatcaaaaattccatcgcggtgtaacccggataatatccgaaatcctgcggcagataacctatgatattccggtaatcagcacccatggaaaccacttctgtttcattaaacagcacctccccggaggtcggttctaaaacagcgcacagcatgcggagtaaggtagtcttgcctgcgccgttcgctcccaaaaggccatataccccaggctttaacactgtgctgacacaatcaaccgctattttcctgccatactgttttgttaaacggtcaagcgataattccatacatcttcccttcctttcttatagctgcaatatagcggatttcctggagaaagaatgcagaaaaaaccacaaacatgataagccacaaaccggttgccgtcgcctcgtataaccatggcagtgcattggccgacaagccccagaagacacaggaaccgagcatgataaatacacaaaccggtaagccctctttctttcgcatgcggatgacgcgcagtaggccaaccatacacaccagatagggaaccaggcagtatagaatcatttgtccgattcctttgcaggaattctgctgataagtctccataaataaaagtatcgtgatgcatactaggttggctgccccggacaggatcagcttcgccagcatgatctgagcgccggatgctctcgttactgcttccatctcactcattccataatattggcttttaaagattaccggcatgatagccaaaacaaataacgggataaagaggggaatatattttggaatatccgacagattggaaattgccaggcatacaagtagtaacgttattgcctgcagtcccagtatcggaatcccctcaaaacgaaatacgtctgacagatagccaaaaaaccccgtccttgcttctgccgtaaatttctgcttacgcataacctcgatacaggaattgattgtttcttctactctttccggctgtacttcctgccttaaagcatgctgcaaatgagctttcaaaactttatcttccatcttgctgctcctttctcatcgcttttaatgcgttccgaacccggctttgcgcggttctcatattacatcccataacctttgcaatttcctcaaagctgagctgttctccaaaacgcagaatcacggtttccctttgttccaacgataacgcatttaaaagatattttatctcttcccgatcctcaacccggagaatttcctcacattcattcaagattgtttcatcgtcttctaaggaataggcctggagctttcggctctcatcaatacacaaatggttcgcaatggtatataagtaggccttgaattttttctttcctttatatctataaatgtttttaaacagcttaaggaatgtttcctgtgtgagatcttccgccctctccaggttggagcaatgccacttacaataacgcaaaatagatgtataatagcgttttatcagttcttccgccgcattttcatctccatcctgtatctgttccactaattcatcgtcgcttagcacgcttccaactccttcccctgtcggcctatatatataataacgaccgatgtccttccattgattaaaaacttcttgattttctttcattaaagcaaaacgccagcgaatcattgctggcatttttaatgtctgggatattcctcttattcataaaaaacagttattttccccaccgattacagcttctctataaactggagagcgtatggttactgggcttcttgtagaatgaacctatatgtaaaacgataaaatagtgaccgattggggtccagatgaccaaaaaactataaagtaacataaagttatgatacgaaatgagctgtttgactttcccacacgctgatattagaatgggaatagttaagttgtgtttgtttgcttttgacggagaagacgtacttgatcaatttgaagctgttaataaaacgcgcaaaactgtactatgatattggtagaacttctcaaataaaaacactaaaattaaaactaccaaaacatagaggaggataggtcatgagtttaggaaataatttatttaatgcaagaaagggcaaaggattatcacaggaagtggtcgctgaaaaattaggggtaagcagacaaaccatttcaaagtgggaaacagatgaaactttacctgatatccagcagtcaaaaaaacttgcagttttgtatggtttaacattagatgaactgattgaatttgacgtcgatatatgggagatacaagaagtcatcgagagaacgagcgacgagatatccaacaaaattgactggacaaatgtatggagtaaaaaatatccaatacttatccaatatcaaagcgaagttgaagtatcttattatgcttcagagctgtgtaaattactaagcgacttagaaaagaattacggatatgacgagctggactcttttcttgttctcaaagatattctggcagttgtctggaaaaacaggaagaaaaagaagcgttgaattttcactttcggattggtttagctaggctttattctattaaggtatcctacgctatagttgttttcaaaagtgacaagcagtatttcacggtacacccgaaatactgcttgctacttttttacctccgcaaaaacatcaagagctgcttgcactgccttgtcaggcactccacatgtgaagcattcatgcgcctttgcaggcacttatagaaaaaattagctattgctgctaaatcttatctttttagcagtctatcagcgaaatcggactgaagcagctggaactatttccccattcattgcttaagacgcagtccaactgtcggaaaattttcgccttttcgccaaaaggcgaaaaaaagcaaaaaaacaaggttcctccaaaaatgaagaaccttgattttatgccgctttcagggccgttttgtggtacttaccgagattagtcaacgctgacgatttctctcttgttataagaaccgcaagccttgcaaactctgtgaggcatcataagttcgccgcacttgctgcacttaactaagttcggagcactcatcttccagtttgctctacgtttatctcttctagctttagaagatttgttctttggacagatagacatggttacacctccttaaactgtttaaaaatatcctggatgactgccattctggggtccatggaccttttgtcgcagtcgcaagtctcatgattgagatttgttccacatctattacaaatccccttacagctttcactgcagagaaccttcataggcagattcagtatgagttcatcacaaaccaactggtctacatccagattataaccttttaaatacggttgttcatcgagctcttctacacgctcctcctcagattcattcaaatccagggtacggactatatcaaattccaacggtacctccaccggatcgaggcagcggtcacacggaattatcagagtaagcatagccttcccttccgcttccagtttcctgttgcccagattcataattcgcagaaccaccggttccttggagacaatctcataatcgccgccaggaccatgatagatgtccatttcaatatcaggtgtataagttttctctttcccttccagggtaaacaactctgacaaattaataagcatattaatctccattaatacgcacctatgctattatacacaggcgcgcatcatttgtcaacaaaatatttccaatattacacaaccagttatttcacaagagctaaggtttctctggcgatggacagctcctcgttggtcgggattacacatactttaaccttggattccggagtggaaatggtcactctcttgcctcttgccttgttgatctccggatcaatctcaattccgagatatcctaaatattcgcatacagcgcctctgatcggtttgtcattctcaccaacgccggccgtgaagacgatagcgtcaacgccgttcatggcggctacgtaagcaccgatatatttggccacacggtagatgaatgcctggattgcaacatccgctttgtggttgccttccccctgtgccttctgaacgtctctgaaatcgctggatacgccgccggacattccgagaataccggatttcttattcaggatattcagcacttcgttgacatccttgccttctttattacagataaactgtactaccgcaggatcgatatcaccgcttctggtacccatgatgaggccttccaacggtgttaatcccatgctggtgtcaacacacttgccgccgatggaagcggatacgctggcgccgtttcccaggtggcagacgataacttttgccttctcaggatctaactcacagtacttgattgcttctttggatacgtagctgtggcttgtcccgtggaagccgtaacggcggatgctgtatttctcataatactcataaggaatcgcatataagcttgccttctccggcatcttcatgccgaatgcagtatcaaatacggctacgttcggtgttcccggcatcgcttcctcacacgcttcaattcccattaagtttgccggattgtgaagcggtcctaagtcgaagcagtcgcggattactttctttacgtcctcatcaacgacgatggagtcactgtagaccgttcctgcgtgcagaacgcggtgtcccactgctgagatttcgctggtatccttgatcacgccgtattccggatctaccagagcatccatgaccatcttgatcgctaccgtgtgattcggcatctctttcttaacttccagttcttcttttcctgctgccttgtgggataaattggaaccctcaataccgattcgttcacacaatccttttgctaaaacctcttcgttctccatatcaattaactgatattttaaggaagaacttccacagttgataactaaaatcttcattttacagtatttctccttttattattttacaatttcgccgtactgttctctgccacaggcagcggcattggattcatccgtgtcgatatgcatcgccagcgcatagctgtcgcttacgcgaaccactacatcgccgaatacaagacttcttccgtctgtatcaaccttaacggaaacgatctcaccgttctttacgcccagtgcctccgcatctgcgctggtagcatggatatgacgctttgcagcgattacgccctctgtgatctcaatctctccgcatggtccgacgatcttacatgctccgcttcccgccacgtctccggattctctgatcggtgcagctacgccaatcgcacgcgcatctgttaaggaaagctctacctgagtcgcttttctgaccggtcccagtatggatactcctgctaattcctttttggagcctacaatggtaactctctcttcacatgcatactgtcccggctgggataaatctttctttcttgtgagttcatatcccttaccaaataaaatctcaagatgctcctgagttaaatgcacatgacgcgctgaagtttctaccaagaatttcatacctgtattctctcctgttctttttaataatatgaatgaatattacaattctgattctattctatgtgctttgattaaaattttcaagtgctgtctcgaaataatttgcattttttatgaaacaatagcataatagagtggaaaactgcaaaaaaaggacgttatttatgaccaaaaatgaaaatgcttacattgtcggcatcatagcagaatacaatccgctccacaaaggacatgcctggcatataaaaaaagcaaaagaactggccggcgccgattactgtattgccgtcatgagcggcgattttgtccagaggggcgccccggcgatctatgacaaatacacaagaacagccatggccttagaggccggcgccgatttagtcctggagatgccggccatcttcgccaccagcagcgcggaagacttcgcggcctgtgggatcgcacttctggaccgcctgggcgttgtcggttccgtctgtttcggaagtgaatgcggtgatatggaagaaatttcccgtgctgcttctattctggcctcagaaccggaactttatacggctgcactgaaggaacatctgaaaatgggcttcacctggccccaggcacgggctcatgcgctctccttaaccggtgattttgatgaagcacttctcaattcgcccaacaatatactgggaatcgaatacgccaaggctgtcgtaagacgaaaaagccccatccgtcccatcaccgtccggcgtcagggaagcggataccacgataccggatttaccggcggcttctgttccgcctctgcgatacgcaaagcgatggaggcatgggaatcaaacggctgccatggatttccggattctgttctccagggaatgccgtcctttgccggggattttctggaaacggctttcccggtcttttccaacgatttctcaacgttattaaatgccgggttgctacgtatgacggcggcatcggtcccctttgaccagtatctcgatgtctcatcagatctggccgccagaatcaggaaggaccttctctccttcactacttttgaagacaggataagcgcgttaaaaacgcggcagtacacctatacgagaatcagccgtgccctccttcatcttctgctgggcatcacggatcaggagatcatggccgcccgtgccgcagattatgcgccttacgcccgtgtgcttggctttaaccgcagggcatcggctgtcctttcagatatcaaaaaaagagggacgatccctctcatcacaaaaacggccgacgccggcagtctcctggaaggaacggcgtgggagatgtttcagaaggatctgttctgttctcacctctaccaggccgtcgtttccggaaaatatcatactcgtctgaaaaatgaatatacacattcggtcgtcatgaagtcatgacggccggataaaactctctatcttatctttatagagcagaaatctggatttcggaaccacgattccctgacgccacatctccatcagctcatcaaacacgacaaacttcgcatccaccacttcctccgcctgaagctttaaatcttccaggttcaccttctggcgggtaatgtacgtatccacaaaccgctcctttaaacaaatggagtggatcaggtgaagctcttcttttgacgcgtggattccaacctcctctgagagctcacggagcgccccttccacgctgttttcccccgtcagcacagatcctccggtgcactcccacaaaaggccgtacggcttatccgggtgccttctggtgagcaggatctccgatctctggttcacggtccagacatcggctatgatatggtactcccctggtcccagcggcacgccccgctcgtgtttcttaccggtcagtttcctgttttcgtcgtaaacatcccacaattccataggtttttcctccatgtctgactcatgtcagtgggaatatgcccactttcctgatgatactagaaattagcgccgttccagccccagtgttccacttcctcgtatttgatataaatcttatcctgaggaatccccagcacctcctcatagatctgacacagtctggccgtaagcttatcgtaagcttcatccgtagtaccgccgaaaatcttcacctccacataagccagtttcgtatcgttcttccccttaaaataaagagaataattgtcctcaaagccaaccatcagccagctttctgatttccccggaatcagggatattgcctgtcccagcttacccttcagcgtttccttttcgccatccgtaagcggcacatttaccctggaattaataaatggcataattttactccttcctgtaattttctctatcataccacagtcaaagagaaaatgccattcagatttccgtaattccagccctgtttttgttcaaatgccctaatcttaaatgccctgatcttccagcagcagcctggccagcgtctgctctgtccccagaaacttcaggatatcctcgatctccttccggttatctttggggcctccctgtttcactgcacggatcagtatattcttcggagtgtgctccatatcgataaactccaggatctgagtccggtaccccctgttttccaggatctccgcccggagggcatcggtgtataaggccgccatacgttccttgatcaatccgtactggaacaccggacgcagcagttcgttatccatctgcttattcagttcatgctgacagcaggggacggagagaatcacggaagcatcccatttgaccgctttttccagggcgtaatccgtagctgtgtcacaggcatggagcgtcacgaccatgtccacatgatccacgccgtcgtaggaggcaatatcgccgtgataaaacttcagcttgtcaaagccgtacgcctcgctgagacggttgcagcgatcaatcacgtcctgcttcaaatccagaccgataatgcgcacctcatagcccctcagctcatgaagataataatacatggcaaaggtcagataggattttccgcagccgaaatcaataataacattttccctgctcttatccagtctcggaagaatgtcttcgatgaattccaggaaccggttgatctgccggaatttgtcgtagcgggaacggattaccttcccatccgcggtcatgacgcctaaatcctccaggaacgcaaccggttttccttcctccaggatgtagcgtttctgcctgttatgggatgccacattgggagcagccactattttctgctgatttttcttaactttgaccgtgacggtccccttctttcccaccatcacacgggcctgtcctttgacagattccgcctccgcctgcttaaaaccgccctcaagcagtccgagtaagtaaggcaccccttcctctttcgtcagatttctgtgaaacgcctgcttttccgtcagttcttccgcctgaaaaaccattccgcccttcagcataaccgggcgcacccggaccttcagcactttgcccggtcctgctccttccttaaggaccggattgctcaaaattatcctgatcagtccttcatccagaaagtcctcaaaaagtattttaatttcatctcttttttcccgatccataccgctctgctccattcaaattcccctgtcctttagttctccgcagatacccagctgctccttaaaagctccggatacggctccaaatgtgcgtaatcgttaaaccgttctactgtaaagcattgattgtccggctgatataccacctctgtgatgctgcagttttccagtgtcttacccaggatccggtatctggccggctccattcctaaaaatgcggagagcatgcttctgattacgcctccgtgggtgaccaccgcgatcttctggtaaccgctctcagccatctcaaggaataccggcatcgcccgccggatgacatctcctgcgcactctcctccaggatacggcaaatcggtctccatcgtttcctgctccttcttaaatgcagcgaatttcacggcgatgtcctcgtcgcacattccttccatctctccaaaggatatctcgcgcagctcctccttaatgatatgttccgcattccagaagcggttcgccgtctccgcagtctgaaccgctctcagtaaatggctggaataaacagcctcaatcttctctcccgccaggcgcttccccagaagctctgcctgccggaagccttcctcggccaaatctacatttacattgcacagctggctgcactggcgcccatggcgaatcagatacagtttcatccggtcttcctcccgttcattctcttctctgtcaaatacggcccagatggtaactcgttcatctgggcctgtgttcattctctttgttgttctgatcttaatttttaaagctgtggatcggagccgggattcttccgccgcgggtcacaaacttctcacaggaataaggattgaccggcataacaggagcatagcccagcagtccgccgaattccaccgtgtctccaatcgtctttccgataaccggaatgagtctgacggcagtcgtcttctggttaatcatgccgatagccgcctcatccgcgataatacctgcaatcgtcgtcgctggcgtatcaccggggatcgcaatcatgtccagtcccacagagcagacacaggtcatcgcctccagtttttccagcgtcagggctcccatggacactgcatctatcattccctgatcctcgcttaccggaataaacgcgccgcttaagccgcctacataggaggaagccataactccgcccttcttcacctgatcgttgagcatggcaagagccgctgtcgttcccggcgcgcctacgcgatctaagccgatctcttccaggatctcagcaacgctgtcgccgatagccggagtcggggccagagacaggtcgatgatgccaaacggaatattcaggcgtttggaagcttcctgggcaaccagctgtccgactctcgtgatcttaaacgccgtcttcttgatcgtctcacagagaacctcaaaatcctttcctctcgccgtttcgatggcggtctttacaacgcctggtccgctgacgcctacgttgatgattgactccgcctccgtcactccgtggaatgcgcccgccataaaaggattgtcgtcaggtgcgttgcagaatacaaccagcttggcgcagcccagggaatcggactccttcgtggcctcagccgtcgccagcacgatctcccccatcagctttacggcatccatgttgatgcctgtctttgtggatcccacgttgacagaactgcatacgcgctctgtaacggcaagcgcctgcggaatggaacggatcagtctttcatccgcatcggtcatacccttgcttaccagagcggagtaacccccgataaagtttacgccaacctcgtgagcggcccggtcgagcgtctgtgcaatcgtcacgtaatcctccgggctcttgcaggcggccgcgcctaccatcgcaatcggggtaacggaaattcgcttattcacaatcggaatgccgaaatcgcgctcgatctctctgccgactgcgacgagattcttagccgtggtggtgatcttgttatagattttctcattgaccgcgtctaaattgctgtcgctgcagtctaaaaggctgatgcccagagtaatcgttctgacatccagcttctcctgctcaatcattttattcgtttcatttacttcaaacatattcaacatatcggggaaccatcctttttcttatgcttatcttgtcatctggttaaatacggtgcatttttgtaaaaatatcctcgcgctggcattttaccttaacaccgatctcgtctccgatctgttccagttcatcggcaagctctccaaaaggctttgttgcgtcgtttgtgtcgacaatcatcatcatattaaagaaatcctgcacgatggtctgtgaaatatccaggatgtttacccggttgttcgccagataagtgcaaatctttgcaatgatccctacggtgtcttttccaactactgtgataatggttttcttcatgctgctttttctcctcgtcttatatagtgataatttccgacatcctgtctcttcccgcaactgcgatcgaaaaatcggacgccttaaatggattatctccgtctgtaatctccagctttacggtctcataagccagttcttcataattattttccttgctcagatggccaagcagaatccgttttaaattatcgtgcaggatgcagcacaaaagccgtccggcattctcattggacagatggccgtgatcccctaaaatacgccgttttaaatagtaggggtaaggccctgcctgaagcatattgacatcatggtttgattccagcaaaagcgcatcaagcccctggagatgatcgattatgtactggtcataatgtcccatatccgtcgccaccgccacagacttgtggtcatgctgaatccggtatgccaccgggttcgccgcatcgtgatcaatggaaaatggctttacctccagatctcctataaaaaagtctacatccggactgatcggatggtacagctctctgggatattctcccaggtacttctgttttgacacctcgtcaagcgtctcctttgtcccgtagagaggaacgccatactttctcgccagaacgcccagtccctttgtatgatcagaatgctcgtgtgtgatgacgattccgtcgagttcactgccctttaacccgatttcatttaagccctgctcaatcctcttattgctgataccggcatccaccagaatatgggaatgatccgaaccaacatagatgcagtttccactgcttccgcttgctatacttaccagtctcatgtttcccgtcctttatctttcaatatggcttccagcccggctttcacatcttccacggtaccgttgttatcgatcacccggtccgccagctcccggaattcttcatccgaaagctgattcttcatgatgcttaaggaacgctctctgctgtaacccctgttttcattcaggcgtctgatgcgattctcttccgatgtataaacataccacatttcatcgtagatgtcatcctgttccctgcccataattgcagattctaccacaattaagtccgcttgtgaagaagaaattttatctttgatcgttttccataccatcggatgaatgattccgttcatcgtctccagtgcgttccggtcatgaaaaatgagcgcggataacagcggccggtcaatggttccatccggatttaaaaagctggtgcccagggcgcggactacctcccggtagcccccctgccctggttccatcagctcatgcgccacctgatctgcaacgatgatttctgccccgtactcagttttcagaatatcgagaatccggctcttcccggcgccgactccgcctgtcagtcctattactctcacgtttcgtccccttctctgtctcgtgctgtctttctattatttggcatcaaaccaggaatccccgacattggcttccacttccagggacacggataaatccgcggcatgcttcatctcatctaccagaagcgcctttactgcctccacttcatcctttcgcgtctcgatcagaagttcatcatgaacctgcaaaacaatgcgtgacttaaggcctttcgccttcagcgcccggtctacgcgtatcattgcaatcttcatgatgtcggccgctgttccctggatcggggagttcatggccacgcgctcgccgaaggaacgctgcatgaaattggctgatttcagttccggcacaggacgtcttctgccaaacatgctcaccgcataaccggtctccttggcatccgccacaagtctgtccagaaattccttcacacccggatacgtctcaaaatatttattgatatattccgtcgcctcttttctggagatgcttaagccctcgctcaagccaaaggaactgattccgtacacgattccgaagttaaccgccttggcgtttcttcgctgcagcggcgtcacctcgtcaagcggtgtatggaagacctcggaagccgtgatggcatgaatatcttccgcgtggcgataagctccgatcaggcgctcatctcctgacatatgcgccaggacgcgaagctcgatctgggaatagtcggcatcgatgaagacgtacccatcctccggaacgaaaatcttgcgaatctcacgtcccagttccatacgaaccggtatattctgaagatttggctccgtactgctgattcttcccgtagccgtgatggtctggttaaaagtcccgtgtattctctcatccggcccgatatagacggccaggccttctgcataggtggaattcagcttggtgagctgacggtaatccagaatcatctgcactaccggataatcgggagccagtttgtccagcacatcggccgccgtagaatacccggacttcgtctttttcccgttgggaagtttcatatggtcaaacaggacttcgcccagctgtttgggagaattgatattaaacgtttcccccgtctcctcataaatcttctgttccagtacggcaatctgtaccttcaggcggtctccgtactctttcagcctcactcgctccgccttgattcccacctgctccatgtggaaaaggctgtagatcagcggcatctcaatatcggtaaagaggctgtacatctctgtcctcttcagttcctccgtcagacggtccgcactcataaatgcgatataccccatatagcagacgcacgtaaatgccttcttctcatcggtctccagagccatttttaccgactgcttaccgattaagccggctctggacggtactgtcagtccgagataatcgcgggccagatcatcgtaatcgtacgtatccttaagcggatttaagagatagcctgccacacccgcgtcaaacagcgggctgtctgattctgcttttaaaaatggaagcagaggcttcagtttcagcaccgatacccgttcgcacgttctgcacaaatctctcgccttttccaccagatattccgcgcgcataaatccctgggggacgaaacagtacgtggcttcctcccctgtacagagcgccatggcggtaagctcgtgatcctcgatcaccagttccagtccgatcttagcccctttcctgcaggaggcaaagacggcttccgcttccccaaaatcagttaccatccgaaaatgcgcctcagccgacggactttccaccggcgtatccgaaaaacgggaaaggagcgatttgaattccagacgcttcatatactggtaggcagccggtgtatataagctgtccgtttttgcatcatcataagaaaactcaattccacagtttgtattaatcgctgccagttccttactcaactgcgcgaggctgtaattctcttccagagacttcttcgccctcggcggtttaatctcctcaatatgggcgtaagcattctcaatactgccgtacgcctctataatggcagcggccgtcttctcgccaatagacggcactcccggaatgttatcggaagaatctcccatcagtgccttcatatcgataaattccttcggagttacatggtactcattcttcacatcctccggatagtagtccttaatctccgttccgcccctgctggttttaggaatccgtatcttaatgtgctcgtcagccagctgcagaagatcccggtcgcccgataccacgacgacctccacgccctttgcctggctctccttcgccacggtgcccagaatatcatcggcctcgaagccggccatcgtaaggatcggaacctccatggctccgagaacttctttcatcaaatctacctgctcatgaagctcctccggcatgggctttcgcattcccttatactgttcaaacatctgatggcggaacgtcggttcctttaaatcaaatgccaccgccacgtggtctgcctgctcttcttccagtatcttaaacatgatgtttaaaaaaccgtatacggcgttcgtatgaagtccctctgaattagtcagctccggcactccgtagaatgcccggctcatgatgctgtgtccgtctattaatactaatttctctttgtccatgttctctcctgtcagatcagtcccgcctgcagccagattctgcactgcagaagaaccgtaataattaatgccataacactgagtgtggataccgcatagcgcatgatctttaccatacgaaccgcttccagtctttccctggactgttcgatcgctgtctcaagcgctcccttgatattataattgcccgtctcggagtctaactgccggattcccacatccacggtaaaatatatctccagttcttccctgcattccgggcaatgttcaatatgctccaggaattcaaagagttcttcatcagtcagttcattcttaatataaggcattacaaggctttccgcttctttgcatgtcacctccggacacctccttccacaaatctctatctatcatacaatatatttcctctcttttcaatttaataatcataaaaaacacttgccaaatggaaaatcctgtgataaaataatcaacgctgtgattgttacgccggcttgtcggaatggcagacgaggtggactcaaaatccattggtggcaacaccgtgcgggttcaagtcccgcagccggcattacacccttggcagggaactgggctggaaacctgataccgaatcaggttttcagtccttttcttttttaaaaaattgaatcagcgctataactgaatccaatagcgctgctcaatatggccgtcttcttcaatctcattttctaatactcctccatttttaatgattgatttcgccgaaccaatgttatttttatcgcagcacatcaatactctggtgatgccaagctttttacactcttctaatgccaaagcaatcattgccgtcgcataaccttttcttctttcaccgggtctgattccatcgcctatgtgaccacccgttttaagtagtttatcatttaaatagtggcgaatactgacagcgccaacaaaaatatttctgtctctgtcaagacaaaataaagttgtatcaggaacccaatcgttgttaagctcttctgttgcgttaatacttttcacataatcatcaaaatcatgaaaatcatttgcccatattctccatggggatatattggtgtgattttctataatatcgttcttccactcttcaagcatgtcaaatagctgatccttatattcatgagttaatttaacaagttcaatattcatttttctctccccattttaattctattattccgttatagttgaataacaaatgaaaacacctgcgctccatactttttaatgtttttcgcgacaactgtattataccactgagttatgattttttctttcttttctttacttttgcggaaggacatagcgaatgatcataaaaatatcagatcatatttttcctgaaacagctgttggaatgcagcaaaagggctttttattttgaaaggggtgtttgctccgatgatacagggaatattatcctgatattctgaggaagggcaacctggacagggataacatacagatcatgacagctcagaatttagtggaggattggaacatgggtaaggacagatttgagaaagtatacacacagggaacgctcaatgtaacggaaatttgggtagataaagagaccggtgtgaattatgtgtttcactgcggcggcaatgcagggggattaacccctctgctcgaccgggagggaaaaatcgtgatatctccaatcgtcagtcactgacataagcagccaaaagcacgttcaaaaagccagacaggattctattactgacggcatgaaaaaggaatctatccatacggcagattcctttttcattttactgcggtacagttccatcactcttttctgaagcttaagcctaacggcttagccacacgatcctttatacgctctacctttcccagaattaaccattgcttcgtacagtctgagcttgcccgttcgccgtcatctggccacagagcccgccattttgcaaaacattttgtttccagcctgctgaaaaccagatagatcatctgcaattcttcttcggtaaattctaaattataaatatgcttcttcatcacgttatccattcccctccattgtcctttatcttctcccgtcctgcttcttgtataaaaagtatacagcttttatggattcaggtcaactatacgaatatttaatcaaccatataaacataccatatgtagtaaactactgaaaaaggagaattgatatggttgactttggaaacaccttaaaaactctacgcttacaggaaaatatgacccaagcccaattgtcccagaaattaggactcactaaatcagtgatcagtgcctacgaaacagggctgcgtctgccctcctatgatgtattaattcacattgcacaaattttcaaagtatccacggattacctcttgagtgtggaacacaaagacagtctcgatttatccggactgactcaatccgaaaaatctgcactcttattgctgatcaaagcaatgaaaaataaataagagcaggaacactatatagaccagtgacagactgccggtaataaacaggctgcatgtttccggatcgggaatataaagcctgtctgactgccgtgaaattcaaggcactaattttctcaggaatctatctacacaaaatcgtaagcaattctgcaatacattttccctccattatggtatactatctctatcgaattcaaatgataaaggaggctttttatgaagcgatatactgttattctcactctttcactcctctgtgccctttcccttgccggctgcggaaaaaagaatcaggacaagaccgatttgacaagcacccacacgaccgcggcgacggaaaccatgtctcccactacgacagccgccgagactaaagagacggaaggctcagacaaagagacggcaaaggcggcggatggcgaatccgaaaaggatgattctaagaaggcggacaattctgccagtgtctctacgtccattcatacctacaccaccggtaatatttccatcgaatatccggttgtctccaatttgagcaaggccgctgtacaggaaacagtcaacaaactgttaaatgaacacgctttggaatttatcaaggcatatggcgtggacgaaagcaaggattctctcaccgtaaaatgccgggtcgtatctgcggaccggaaacgcctgactgctgtttacacaggctcctacatgccggacggcggtgcccatccagtcagtctcttctatacgaataccatcgacaccgcgctcggagaagacatgggactcacggactatgcggatccttacacactggccggatatgtgctgtctgctgactgccagtttgctgacgcggatgccacactggaaaaagaactgatgaagattaagaacgacacggatatcgagacgtataccgaaatgttccgccgtgcggatttcccatggaaagagccgaaaaccacctccaagggttccgacgaagccttaaaattcccggaagttttcagctacgaggatcagggtaccatctatgtttccataccagtacctcatgctctcggtgattttgcgctgataaagtacacacctgacacaaaatagtgaaaatagttgctatttaaccccatatttgataaaatagtacggaaaaatacaaagatatgaaatggggtagcaaaatgagtgaaaaaacgcaactgacaacacgagactatctgctcagcatccaacacctgtttgccatgtttggcgcaacggttctggttcctttgctgaccggtcttaatccatcgctcgcactgttttccgcaggtgtgggtaccttaatattccactgctgtactaagtttaaggttcctgtttttctcggttcttccttcgcatttctggctgcgttaagcgccatcattcgaccggaaggtgccgtggttgcagaaaacattcctttagcacagggtggaattatttttgccggtctgatctatctgctgtttgcgctgattgcttttttaatcggggcggacaagatcaaaaaggtatttcctccggttgttacaggacccgtaattgtggtcatcggtattaacctggccagtaccgcgatcggtgatgcgaccggcggattaagcctggcggacggccttacctccgagatcgctttaaacctgggcatcgccctgtttacgctctttgtggtaattctctgttccattttcgcacacggttttttcaaactggtcccgatcttaatcggaatcgctgcaggatacattctgtgtattattctgggcgcagtcggagtcttccatatggattattccgccattacgtccgcagcatggattaatatcccgtttgtgacaaaggatatgaatggagttccctttatgtctcttccgaaattcgagctgggcgctattctctccattgcaccgatcgcctgcgtcacctttatggaacacatcggcgatgtcaccacgaacggtacggtagtcggaaaagatttcttaaaagatccgggtctccacagaaccctgatgggcgacggacttgcaaccttatttgccggattcgtcggcggacctgccaacaccacctattctgagaataccggtgttttagctacgacgaaaaattacaatccccgtctcctgcgtgtgaccgccatcttcgcgatcatactcggccttttcggaaaggttggcgcaattcttcagaccattcccggcccggttaaaggcggtgtggaagttatgctgttcggtatgatcgccgcagtcggaatccgttctctggcggaatcagatcttgatttcactcacagccgcaacttaaccatcgtcggactgattctcgtctttggcctcggttttgcgcagctgggcggactcaatatccacgcaggctccattacacttaacatctccggccttttcatcgccgtagtcatcggagtccttatgaatatcatactgccgcagacagctgatactgtaaaaaactaaagaaaggattactataccatggaatttccaattgaaaatgtaactgtcttcagccacccgttaatccagcacaaaatttctatcctgagggataagagaaccggaaccaatgagttccgcgcactgatcgaagagatcgccatgcttatgggctatgaagccttaagagatctccctttaaaggaggtcgaggtcgaaactccgattgaaacatgcatgactcccatgattgcaggaaagaagctcgccgttgttccgatccttcgtgccggactcggtatggtcaatggaatccttgcacttgttccgtctgccaaggtcggacatatcggtctctatcgtgacgaagtcacccatgagcctcatgagtattactgcaagcttccgaaccccatcgaacagagaaccattgtagtaacagatcccatgctggctaccggcggttccgctgttgcggccgtggatttcatcaaagagcacggcggaaagaacattaagtttatggcgattatcgctgctccggaaggtctggaacggcttcataaggcacatccggacattcagatctatgtcggccatctcgatcgtcagttaaatgagaacgcctacatctgcccgggtcttggcgatgccggagacagaattttcggtacgaaataaaccggtgctgatatagcaaaaagatgtgctctgcggatcgtgaaatctgcggagcacatcttttttattgtaatcttttttgtcagctttatgcgatcagccaattcctttgtatacaatactcataataaacaccagaacggcaagccccacataaacatatttcgccgcaaagcaaaacagctttccaaccggctttttccggccggtattcagttcctctccaatcctgtttatccccaggacccagtagatcatgattgcgcagagcaccgctccaaacggcacaacataaatcgttatcatatccatccaggagcccatatacggctcatattctatgaaaagtccaaccaggaacacgagactgcccaccataaagactgctttcttccggctgaaatgcagatgagtctgaactgcctccgcgcacacctcgaacatgttgacaagggaggtgattccggcaaacaaaacagaaagaaagaatagcacagccacccatctccccgccggtatctgtgcgaaaaccttcggaagtgtgataaacatgagaggcggaccgctggccggatccatctgaaatgcaaacactgcgggaatgatggcaaagcccgcaagcagagccgccaccgtatcaaggagcgcggtcgtcatggctgccttcggaatgtcttcctttttgtctaaatagctgccgtaaataatcatacccgagcctgtaatcgacagggaaaagaatgcctgtcccatagccatcacccacgtctccggctttaacagcagttcccagcgcgggatcagcagatactcataaccggcaaaggcgccgtccagaaagaagaccctcaccgcaatgatgataaacaggataaaaaatgcaggcatcataatacggttgaccttttctatgcccttcaggacaccgcccactaacaccgccatggtgatggcaacaaccataaaatgccagggaacactgccaaaatggccggtcgcctgtgaaaaatagacctctgcctccatccccatcatgactcccgacagagagccgaataagtatcgaagcacccagccaacgataatggcatagccgatcgcaatccccagtgatccgatcagggggatggctccgagtagtgctccgccttttttgccccgggtttttaatgcatagccataggaaccgatcggcccggttcctgtcagtcttccaaatgcaaattcacccgacagccctaccagaccaaataaaaggataaaaccaaaataaacaattaaaaaagctgcgcctccgtactgccctacgcgataggggaacatccagatgttccccataccgactgcagagcctacggaggccagtataaatccaagccgcgagccgaactttccgttcttccccgcagtatgtgttttttctgacatatcgttttgtacccctgtactcttactctgcttcgcgcttttctacaacttcaccctgcttcttgtagatgcagccgccgtcaacacagcctcttacgctggaaagcggatagatattggatttcggtccgattacggttcccggatttaaaacggagccgcagccgacttctacaaaatcacccagcattgccccgaatttctttaatccggtctcgatatctccatcctctgcgtgaaccttgaccagagtcttatcggacttcacattggaggtgatggaaccggctcccatatgcgccttatatcccaggatagaatcaccgacgtaattgtaatgcggcacctgaacgccgtcaaacaggattacattctttaactcacaggagtttccaactacagcgccttcgccaacaataacgttgccgcggataaatgcgcagtggcggatcgatgcgcccttgcagatgatgacattgtcagccagacatgcagtcggcggcatcttgacggatttgtgaatccagatggatttgcccatacggttgtattcgtcttccgggagcagttctccaagggaggtgatatactcgccgatcttcggaaggatttcccaaggatacgtgtttctttcaaataacagttttgcaatggtgtggctggtatcaaataaatccctgattatcatgtcttcttttttcatgttcttaattctcctattttgtttttttataattagccgccgccgcatcaaaggcgccccgaaggccgtattgattgttcagccgcaatacattggctgtacgtccggcgacaaaattctcgagtttctgcatgtattcgtcggaggtgatacttccctccgccacataagtcagccccttttcccaactggccgtcagttccggattgagaagctggcggattgaggcgtttaccacgtcgaagatcatctctcccagaagtgtgggggtgatcacctgggttttctggttcagggccaggtattttatattgaacagcttctttagaatctcagcacgggtagcactggttccgatgccgctgcccttaatctgagcccgcagctcgtcgtcctcgatcagctggcctgcattctccatggccagaatcatggaacccgaagtgtaacgtttgggcggtgatgtctcaccttccttgatcgccaggctcttaagcgggattacggctcccttcttcagagtccccagcatggcgatgaattccgggttatccatgttcttctgtgcagaatccgtgtttccctcatcggaatccccggaggcgttctccgcctgtccgtctttccctttggtatccgtcttttttctgcttcccggaacgtctgccacctttaagtaccccgcttccagcataacacggaaattggtgaaaaaatgttccttgtcaatcaccagttccagcgcatatttctgatagatggccggaggataaaagatacttaaaaatcttctggcaattacctcgtaaacctttgcggacagcggcgataagctcctcaaagcccccatgccctgtccggtcggtatgacagcataatggtccgtaatctgtttatcattcacgtaccgcgtctttgcaatccctttaaaggaacctgactccagcgcttctgctgcaaatccggccagaggctcgaaatttttcaaccctccgatatttttgtagatctcctttgccaccgcggtggaaaggactctggcatccgttctcggatacgtcacaagcttcttttcatacagttcctgaactacctttaaggtctcatccggactgatcttaaacatcttggaacagtcattctgaagttccgccagattataaagaagcggaggattcttcgtctctttcttcttctcaatagcctgcagcaccgcattcatgggctgaaccgcggacagcgactcgatgagggcttccgccgtctttctctctttaaatccattctccttatagagatacggggattcaaagtatttagacccgggagcgcttctccactctccgtcaaaatccatatcctgaggagaaaaagtaccgatcacccggtaaaaaggggtcttcacaaagtctctgatctcccgctcccgccgtactgccatgcccatgacacaggtcatcacccgccccacagaaatcaccgtattcttcccggttcttaaatagttcgaaatattctgcccatactttagtgtaagcagacgggagaaattaattcccatcagataatcttcttttgcccttaaataggcggaagcggaaagattatcgtattccttctcatcttttgcctccctgattcctcttagaatctcttcctctgtctgggagtcgatccacacccgcttctgggctttatccttcacatccgccatctgggccaccagacggtatatatactctccctcgcgccccgagtcggtgcagacatatatggtatccacatccggccggttcagcagaccgctcacgattttaaactgtttttccacgctgggaatcacttcatatttaaattcgtttggtaaaaaaggcagagtctcgagactccatctcttgtattttggatcgtagcattccggatagctcatggtaactaaatggccgacgcaccatgtgacaattgcctgttccgattcaatataaccatcgctgcgccttccgtttatcttaagcgcattggcaaattcctgtgctacacttggtttttctgcaatgtataaagattttgacatgtatatccccactgatttctattcataacccgtctattataccattgaaaaaccggaatatcaatgatacaattataaacaattctatttctattttattacgttaaagtgaaggagtctaattatgtctattgcaaaagtaaaagaatatttaagggattatggcagagactgtgacgtgcaggagtttccggtgtccagtgccacggtagaattagcggccaaagcgctgtccgtggaacctgcgcgcatcgccaaaaccctttcttttcatggagatgaaacgaacggctgtatcctgattgtcacagccggggacatgaagatcgataatgccaagtttaagaagcagttcggttttaaggcccgtatgctgggggccgaggaagtagccatgctgacaggccacgaggtgggcggtgtctgcccgtttgccaatccggaacacgtcaccacttatctggatatttccatgcagcggttcccctccgtgtttccggcggcaggaagcgccagctctgcgattgaacttacctgtgaggagctcttcaaatattcacaggcaagggaatggatcgatgtctgtaaagcaaaggaagtacaggctgtataaagaatgtcctggttatccgggctgaacttatgataaaattgcttgtttctttatatgaacaatgatatactagccttggctgaagctggtatcgtgatacaggtaatccatatcaggaggtaatcatatgttagaacacagtgatttgcaggcaatcagggacattatgaaagaagaaatcggacggtcagagaatcttctcaaggataatataaagactgagatcggcaggtctgagaatcttctcagggatactataaaggccgagatcggcaggtctgaaaatcttgtattaagtgaggttgacagagtacaggagaaccttgaaacgaagatggaacaactcaaaagaaatatggatgagttgacacagtattatcggacggtaaaactggatcatgaaaacaacgctcttttcctgcagatgattcaggaactcaaaaaagagatggagcagctcaaaatcaaaatcgcataaaaactttatatgaaagcattacattcctggcaaaagtaagtaaaagaaaaggcagtgaaaaaagagttagatcaacacctttttcattgcctcttccgcttctataaagcagtttgtcattttaagcacttcttttttatcctgtatactggcttgcctgcatctgaaacatctccgcgtactttccgtttaagcgtatcagctcctcatgatttccgtcttccagaaagataatccgcctgcagaatttgcagctggaaagacggtgtgatatgtaaatagtggtacagcgctctggcaatcgccagcttctgcagttccccactcacttgatttatgtaaatttcacttagcacacatcaaattctctctcttgtcaatgtatcgtccaaaattctgacagtttattatcaaaaaaacgcagggctcctgtttccaatggtttctccatcagtaacaggggctctgcggcctttatagaaaacggatatcaccttttttccttggcgccgtcctctggtattttacagcggggtacccaagaagcatacagcaggccaggggccgtccgtccagccccagccattccatcagcttcggactcacgctgatcgttctctggagataaccgctgtacaatacgccggcgccttccgctacggccatattttccatgttggcagctgccaggcctccgtccagcgggttatccgccgccgtaatcagcaggcacggcgcgttgaagaaaaaggtatcatccttcggatccttcttccatttctcataaaacctcgtaaaggcacgcacgtattccggcttcgtttccttcagggcctccagaatgtacggaaattctgaccagaacagttccttaaactcctggagacgcgtctgcactgcgacaaaggtacaggcctgcgcattctttgccgtggcggtataacggcccgcctccatgatccgttccagcacgtcccggctgacaggcatatccttgtagctgcggatgcttctgcggaatttcactgcatgaagaaaatttccgggagctacggtaaaggaatcctcctgatatgcttccactccggccatgtcataatccggtatggaaaccgccccggagggacagactgccacacagtggccgcaggtgatacagggcctttctgcagcggccttatgatcccttaatacgatggcgtttcccggacagtcctgtacacagagtccgcatccgatacaacgttcttcattgattacaattgcgctgttcattactcacatctccttttcctggtttgattgatggtgttgtttttttcctgtattcagagagaatcaccgctgcaaacatcaatgcgcagccggccatgagccggatcgtcagcggatcgcccaggaagatcacggaaaagataagaccgaacaccgattcaaatgacaagagaatcgatgaggtgttcggcgttaagtatttctgtcccacattctggagaagaaatccgatcatcgtgctgaaaattcccagatacaaaagactgattatcatggagttatcaatcaccctgccgtcaaacggcccctccagaaccggcgcgataatccagcttaaaaccgcggccacgaccatttgcagaaccgtcattttgaccggatcatggtcttccgtatagcggtcgataaatacaatatgtaccgcatagaagaaaccgcagatcagtgtcagcaggtctccgatgttgatggataaatccccctccagagacaaaagagccaggcccacgaccgcgatgcaggcagcgattatattatttctcttcggctttttatggttaaagagccagtggagaaagggaacgaggatcacatacaatgttgtgataaacgcgtttttgctggctgtcgtatattttaatccatacgtctgaaagaaatagctgacaaagagaaacacacccagcagtccgccgcagagtaaatctgatttgttgatcttcatcacctttctccagaataccaggatcagcgcgatagccgcgatcgtaaaacgaagcgccagcaagtaggtgggggatatgatgtccaccgaatttttcatgacaacgaatgcgcttccccagatgatggtcgtgatgatcagcccgatggctgccagtagtttaattccttttccgtctttcgtactcataggtctccctaatgtcctttcacatacgtatgggctgccgcggccggataacagccgcggcagcccgttcttttttatggtgctgcaacgccaatacaattgctggtgttactcttacttctgctgtgtaaaccgatacaccgtagtcgtccggtattcctctcctgctttcaatatcggagatgggaattccggcatattgactgcgtttggatagtactgcgtctcaaaacagtatccgtatctcggagcatagatcatcccattcttgcctgcaggacctgtgcccaggaagttgccggtgtaaaactgcattcccggaagatcggtgcagacctccatgcggattccagttttgccggattcggctgccgccgaaagcgcagtttcgccgggcgcatgatttaagatccagttgtggtcatagcccctgccaagaatcagggcctcatacgccgcgtctatgtcacgcccaatctccttcatgacggtgaaatccatcggagttcccgcgaccgggacgatctctccagtcgggatggatcccgcatcagcggccgtataggcgtcggcgtcgatccatacactctggcccatggcatttccgccgtcctggccgtccagattaaagtaagtgtgattcgtaaaattggcgaccgtatcgctgtcagataccatgtggtaagcgataattagactgtcatccggtgtcagcgtgtagctcaccgtaatgtcggcatttcccgggtatccctgatcgccatcgggactgaacagagaaaagcggacagtggttccgagatccccttcctctgtctccgcctcccagaggcggctgtgatagagatccggcgcgctgtgtaaattgttcgttccgtcgttcgcagccagccggtactctttcccattcagcgtaaaccttgcccccgcaatgcggttggcgttgcggccgatcggagccccaaagtggggcggattctccagatacgcttccacactgtcatatcccagaaccacatcgaccagtttcccatccctgtcgggcacatacatggtcacccatgtgccgcccagatcggtaaatgatgccgacacgccgttatcattagaaagcgtatagagactgaccggttctccggaaggcatcactccccactgttctttcctgtaagccatttctgctacctccgcgtttatcttatttgttttacgattttgcctgaatatatccctgggctgtcaagagctctgcacagagtactgcgccgccggccgcgccgcgaaccgtgttgtgagacagtccgacgaacttataatcgtatacggtgtcctcacgaaggcgtccgatggaaacacccatgccatgttcaaaatccacgtccatggtaacctgcggacggttatcttcattgagatactggataaactgctttggagcacttggaagttccagttcctgaggaagccccttgaagcttacgagacgctcgatcaattcttccttcgtcggttttttgcggaattttacgaaaacggcggctgtatggccgtttaataccggaacacggatacactggcaggtgataacaggctcgttcgctttgacgatctctccgttttccaccttaccccagagtcttaacggctcctgctcgctcttttcttcctcgcctcctatgtaagggatgatgttgccttccatctcaggccagtccttaaaagtcttgccggcaccggagatcgcctgatacgtcgtagccacaacctcgtacggctcaaactctttccaggcggttaatacgggagcataactctggatagaacagttgggttttacagcgatgaatccgcgttctgtgccgagacgttttctctgatccttaatcacttcaaaatgctccggattgatctccggcactaccatgggcacatccggtgtccatctgtgcgcgctgttgttggaaacgaccggtgtctccgtcttcgcatacgcttcctcaatcgccttgatctcttccttcgtcatatcgacggcgctgaatacgaaatccacactggcggccaccttctccacctcgtttacattcatcactgtcagctttttgactgcctccggcatgggagtcgtcattttccagcggtctcctacggcctcttcatacgtcttaccggcagaacgggggctggcggccacggtcaccacctcataccagggatgattttcaagcagagagataaatctctgacctaccatacctgttgcacctaacacaccaacctttaacttcttttccatagttttctcctcatttcatttcttttttcagactatcctataacaaagttaaaaaaaaatcaaggtttattcgtcacaaaaatacatttgtacgtacacgagagacatttctctggaatgtacgtcctggaaaagaatcttccagtcaaaaaccctgccgcaagcaacggagcatcaaatttgcaacgcctcgagcggcggggtatttgaccctcgcggcagtcgccaaatggacacgctgacgcgtccatttggctcgttgcccgcgggaataaatcgcacaacttcagcttatgattttacagcaaagataattcccagcgtattgggaccgcagtggctggacacggtacatccggcctctgtcaccagaatctctgaaaagatgccccggcttcttatcagatctgcggcttcttccaacaccgcttccgaacaggctgcgtgagtgagaaagatgatatccggtacacagcggtccttcaccgcgtcaagccgctcctcgatataccttctcacacactgccgaaatgccccgcggtattttttctccaccgccagcgttccgtttttcatacagatactgggtttgatgtttagtaaattagcgccgaatgcggtaaccgccgaacagcgtccgcccttcttaagataatccagcttatcgatgacaaagctcacatccatatgcgccttcagctcctccagctttgccgtaatctcttccaattccatgccggcagccgccatctttgcggcagcgacagccagatagccgattccggtggtaagattcatggagtccaccactgtgacgccaggaacctcatttgcagccagaaccgcgttctgatagcagctggacagccctgaaccgatggtaaaatggatcagcgcgccgcattctttcctgagttccgaaaaaactccgcagtattccgccgtgttaatcgcggttgtactgcagatctctcccccttctgatacatgacgaaagatatcggccggtttcagttcgattccatcccggtacgtctttccatccatgataatggcctgaggtatgactgcaatcccatactgttctgccagttctgccgacaaatcgcaggaactgtcagcagatatccctattcttttcaccgtgttttcctttcctgcggcggacagtggctcccacttacgacaggcggaccttactgccctttccgtcacgcttcccgatctttaaacggtttaaatgtacttcctttttcttgtattcaaccacgggatcttctcccagcagataaacggtctccagttcctctccctgtgccagcttaatgccgcgtacgcctctggaattcttcttcatctcaggaatctcttccagtgcaaaacggaggaatacaccgtttgaggtctgcagcaccacctcagtctccgcccggagaactaaaatcgataccactccgtcgccgtcctgcagtttggtagctgccacggttctgttattcgtctcaaattcctcgcccggtacccttttcacaagcgcctgtctcgtggcaaagaggaatcggctgcccttcatggattctgcactgcacagatagataatctcctcttttgtgccgtcatacttgcttaagttgtcgatcggcgtgcctttatccctcagcttgccatagggaatatcggcggctttcacctggtgcagattgccggtgttggtgaacatgcagattttatccgtattgaagcacgacaccacgtggacattctccgtctcaatggtctctctgttgcggtcataggtggacttatccaacagcttgcagtaaccgaaccggtccatgacaaataccacctctgataccgccaccgcagtctcatcataaacagcctcttttccatcctcgatgagtgtgcgtcgcggtgtggcaaactcctccttgatggccgctaagtctttcttgatcacgacatccatattggaccggctctccagaatatggcggtactcggcgatcttcgccatcgtctccttgtactccttctccagagccagaatctccagaccgatcagcttatataaccgcatctccaggatggcactggcctgtttctctgtaaaatgcagtttttttgcatcctctgcaaatccggatacccggaatttgatgttggaggtatctcccgtcatcaggcaggccttggcatcctttaagttttttgagcctcttaacacggcgatgatcagatcgatgatatcgcaggccttgatcaaaccttccctgatctcctttttttccagttccttctccaaaagcgcctggtatttgcgcgtcgcgttatggtactggaagtccagataatttttaaggattccctttaaattcagggtttccggccgtcctccggcgatggccagcatattcacgccgtacgtatcttccagcttcgtcttcttatagaggatgttgcggatcttttccacatccgcgtcctttttcagttccagcacgatgcggatgccgtccttgttggactggttggagatatccaccacatcggtcagtttcttcgattccaccagttccgccacatcaaccaggaatttgttgattcctgcgccaatcatcgtgtacggaatctccgtgataaccatcttgtccttgtcggccttgcgctttcccagctcaatatcgatctttccgcgaagcttgatctttccgcttcccgtctcatagatctccgccaggccgctcttgttggcgatgattccgccggtcgggaaatccggccccggcatatattccatcagttctctggtcgatatgtcaggattgtcaatgtaagccatgaccgcgtcgatgacttcccccaggttatgaggcggaatactggtgctcataccgaccgcaattccctccgcaccgttaatcagcagattcggcacccggacagggagcacttccggctctttttccgtctcatcatagttaggaataaacgcaaccgtcttatctaaatcctttaagtagacttcctctgcaaacttctccagcctggcctccgtatatcgcatggcagccgcaccgtcgccttcgatggagccgaagttgccgtggccgtttacaaggggcatccctttcttgaacacctgtgacatcaccaccagagtttcatagatggagctgtccccgtgggggtgatacttacccatggtatcacccacgatacgcgccgactttctgtgaggcttatcgtggtttaagcgaagttcgctcatatcatacagtacacgccgctgtaccggctttaatccgtctctcgcatccgggattgccctggcagtgatgacgctcatggaatagttcatgtagctcttctgcatttcctcggaatattctgtttttacaatcttttcagccatgctccctctccttatgcatcaatctctgcttcatccgcgtgctcgtaaataaactggcggcgcggcgggacgtcgcttcccataagcatctccgtgatttcggaggccatacgtgcatcctcgatctccacctgcttgagtacccggtgttccggatccagcgtggtctcccagagctgctgcgcatccatctcaccaagacctttgtagcgctgcagcgtaaaatcacccgtgtgcgtcttccggtaacgctccagctccttctcatcgtacaggtactgttcctcgccgcgcttcggaatcaccttaaagagaggcggcatggcaataaacacatgaccgtcatagatcagttcgggcataaaccggtacagaaaggtcagaagcagggtgtcgatatgacttccatccacatcggcatccgtcatcagtatgatcttatggtagcgaagctttgtgatatcgaaatcgttgccgtacccctccgagaaaccgcatccgaaagcgttgatcatcgtcttgatttcagcattggccaaaaccttgtccatggaagccttctccacattcaaaatcttgccgcggatgggcagaatggcctggtacatcctgtttcgcgctgttttggcggaaccgccggcggaatctccctcaacgatgaaaatctcgcacttctccgcatcgcggctttcacagttggccagcttaccgttgctgtcaaaggagaatttagacttggacagcatgttcgtctttgccttttcctctgcttttctgatctttgcggatttttccgcacaggaaataaccgccttcaggatctccagattacggtcaaaatagcgctgcagttcatcgcccgtcaccgtaaagaccgcctttgtggcatctgcgctggccagctttgtcttcgtctggccctcaaaaatgggatccgggtgtttgaccgcaacgactgccgtcattccgtttctcgtatccgcgcctgtaaagttggcatccttctcttttaagattccaagttccctggcatagctgttaatcatctgcgtaaagcgggtcttaaagccggccagatgggtaccgccctcctgagtaaaaatgttattacagaagcccagaatattctcctcaaaggtatctacgaactggaaggccacctccacttccaccttgtcgatggtacccttgtagtagattggatcatgaaccggagcctttccggaattcagttccttcacgtatgagataataccttccggttcatggaacagtatggtctcctcctcgcctccccgcttattctgataggtaatctgaaggttggggtttaagtaggcagtctcgtgaaggcggcttttcagccattccgccttaaaacgtgttttttcaaagatctccccatccggcagaaaattgatctctgttcccgtctcttttgtcttaccccgagtgggaagaagaccatccaccagttctaccgtcggaatgcccctctcatatgcgtcgtaatgaatcagaccgttcttatatacctttacgctcatccgctcggaaagggcgtttacaacagaagagccgactccgtgaagtccgccgcttgtcttgtacgcatcattatcaaatttgccgcctgcatgaagggtggacagtacgattcgctccgcggacatgcccttcttatgcatctccaccgggattccgcgtcccgcatctcttacggtacaggaaccatccgcttccagtgtaacccagatctgattacagaagcctgccagatgctcgtccactgcgttatccacgatctcataaatcaggtggttaagtccctttgtgccgacgctgcctatatacatacccggacgtttccgaactgcttccagaccttccagtacggtaatactgtccgcattatactgtgttttcgccatgatactcctccacatcttgtattgtctttccttattatacaatggatttcccacatttggcaagtttttaacagtttttttcaaaaaagtattgaaatttctaccagagtcgtgctataatatatgacgtgtcagttaaatgactaagcagatatagttcattggtagaacatcagcttcccaagctgaggaggcgggttcgattcccgttatctgctttttttattgcctgaatatgaatttcatccgcttctgacagcaaaagacacgggagacccgtgtcttttatcatccatttccatgatactttcattcattactctttgctgttccagtccacatcatattccttttccacagaaaacttattcatcatactgtctgttgtgctaaaggacatgaagtattcataatcgtctcccgattggaaccacatatactcatctcccttaaaatccggaaacatctctcctgccttttccctggatatctcactgacaggtacgccgttaaaggtaatcttttccagctcgctcttttcaccgctggtcaaactgaattccaaccgggcaatcactgcgtctcccatacggacggcattttcgtccgtgaccagggaaatatgggcaaatatggaatccgtgacccagattgatccgccggtataataagaattcggctccagcgtcgcatcgggatcaatctcatacttattaatctgcttgtcttccgtcatctcggataccgtaacattcatcccttcatccagaagcgtctgcactgtggtctggccaaccaggatttcttttccgtctatcgtaaccggatacaatgcctgctccggttctgcttctgtctccgttttgctgctcttaccggaacagcctgccaacagcattgctgccatgaacagaattacacctgttttcaaaaactttttcctcatataaattccctccatcatttgttctgtctgacatttacctcccagtctgtttaaaaaagaaaaaatccctgataaaatcagggattagtcagctcccggccggacttgaaccggcgacccacgcattacgaatggacttttattccttataaatcaaggttttcaacgttttttcgtcatttcttggttactgttatgttgttttatgtggctattttatggtaaaaacacgtcttttgtggtgtcgtagtaaccaaatagtaaccaattatcagggcgggcccggccattccgatacccacctgtttctttcaagtcctgttacccgcagttatagaaaaacatttaagttagagaagaaaggaaaaaagatgaaccgcgtcatgctcagataaccgaaaatgcaaaatatcaggagacccgtaaaatggcggaaatgataatcgatgtggatatatcagccatgtggtttttgacatagagatcgtcagatacctaatgccggctaatgtaggaaacagggcggagccatggggaagctgccgccctactgattaatgagcatatttatataacgtttttcagtcgatttgtgacgcaaaagcgcacaaaagccacccagcgtaagggatactgagcggctttgcatgaatactctttctgatacgccagaaagatatatgaattaatacgagcgaatttattatatcatttctgcgaccttctggcaagaggtgtgtttaaaaaatagacggcgtgaagcgcctttagaagtaaggcggcccaaacggaccgcctttttcttaccacttcaactgaccatgtcaacctgacacggtctatcccgccaacatcttcaccgagttctcctgaataaagttcttgatctgctcatatccccaaccgcagcttatcaggctgctcaccaacatttccatagactcaatctgtttaagctcatcagccgtcacataatcccggatactttcctttcccttaacctcatactgttcctgtagttccttcatggtctttccaaaaatagtctgataaataaactttgtgtaattaggatatataaatttcttatgagggctgtcggctaccttcattttgattgtatctgtaagaatatggcgaacgattactcctttatcccgttcgatctgccattgctgacgctctgtatagattcgtttgagttcagcttccatggcattaaaagccttgatataatccagtttccactttaacgctttttcgccggtgaagcccatcgcaagtaaagaaaatccgtctctatccatttcgtacatggggtattcttttccgcggctcttatatgttgtctctttaaaaaaactggcggctgaattttcagccgtgagattctcaattgcctgaatgacatttttatgttccttctcaaaatgctccgctactttaagacttgttgttactaatttttcctcatatctcttaccagtaatttctactaacataaaattcatcctttctctgattttatttttggaaaatagaaaagccacgggattcctcccatagcttcagtcgcatcattattctgttgtttgctattccacccactgcacctcaagattgccctgtgcaaggttgttcgttaccatcagcgccccgtatgtcgccatatcagccattgatgggttaagcatatagaccaggccgccaatcacagtgtatccagtaaccatgttcccggaatcgtccacgtagaaccatttattcttatatttgatccaccgcgccttctgcaactcgccgttaatcgtaaaatgccagttcccggcgccgtcctcaaaactctttacatcgtcctcctggccgcggatccgcaggcagaagtccgtccataactccggattatccatcatcttacgagggcaccatttccgtttggcgtcatagtgccggatcactcgatcagcagggatccccgtctcctcaatcagataccgtaccagatccacgcagttaagccgcgccttattgtagtcgctgtcaggattaacgcagatctcgatgttgatcgtgttgttgttattgactccagccaccaatggagtgccgtactgcttgccgaccgcccatgcgccgtctgtatggttgagagtctggtagatcgccacatcgtcaacgtagtagtggacggacgtggcgatgttgccgttgacgtgtgctctggcgtgagattcggctccggcccctttgttgaaattatcagtctcatggattacgatgtactttgggtgattctggcttgcatagcaattgatctgtttgatttgttttgtaataggtaacatagttagcctccaatctaaaaaagggcccagcccccccaggcccataaaagttgtgatattacaaccgttgcgatatcgcaagcagcttattttgtcagctgcttgtacgcctggttgataccggtagccgcaagccccgatacagttccaaccgccgccgcgttgatgatgtccgccgccgggaagtcgggcatcgtgtacatgcctgcaacgcccaggattgccccaataacgccgcaaattaccggcagccacttattgtctaccgccgtcgctttcaccgccatagcggccaaatagcacaacgctgtgatacctgctacacttgcaattcctaaatccataattacccctctctttccagatccccaattctgtgattgacgaccttaatctgctcctgcatcacggcctgagcctcctctaacttataggtccgctcaattaccgtgttatgcctgtccacttttttctctaactgctctaaccggtaggcggtcagcttcgcagacgcaaacacaccggcaaatgtaccgattgcactgcctcccaggccgatcagagccaccattacatctgtaggcatatataagccctcccgtcagttattccggattttctttcaaccacgcttctgtcttgggccgccaaaagtttggtacttcatcgatcgtgataatacctcgcctgatccgtgttccgtaaaatgctcccattaaaccgtacctccttctgctagtgttccaaccactttaccaagatcatcaattgccccgtcctgcaccgccttaccttcctccagcgcgtccaggcgcttttcctcatccgttttctcgcggaggctataagttgtaagcaccgtaccatctgcggccaccatggacgtttcagatacaagtacaaggtcagtataattacctaccactaacccatcaccgttcttaatctgcactgcggtgagattgtcatgagtcagcgcctcccaggtcgttaccatggccgcccggtttgccgccgccacctgtatggatcccaggcttgcgcctgcctccaactcgataatagttccattttttaagatcatagtgtctttcaccatgtacctccattctgaaatatacgaccctcacgggttaggttgacgagtttcttattcgtgcaaattagtgatatgtcccccggattactccgggggctggcccgccttagtatgcattgtcaataggcctggcgggatctgttaaatagtgatttagctcttgtcggtaatgttgacggcatggaatttggaaccgacggcgaaaaaagatattttgtttttaagcataatgacgactccaaatcatcactggagttttacaataatggtatcaatttggtaagatatgatccacaaacagcaaaatgggaaattatatggtcaataccggttccggtaaaatgatcatttgtttccgatggcgacccagattaatgtaatctccttatttatccaatgctgccccgctacgtttacggatactgaaaatccggtagaattaatttcccgtacgctggctgagcattgatcatatgaatacgctaccgtaggaattacaaaaatatcgttatctgcaaaggtataaccaaatggtatattgcaatttccatactcgtcagtagttactacgcagtatgcgttccatattatttttttgttaccaataaccatcaccgctaaatcactattttgcttatcaagctgatcttttaaaatttttccaaaacgtgcatccagtgcatagccttcttccgtgcagaggccatcatttatcaactttcccaccgtaataagaccgtttcttatattattaaaatcctcacagaatttctttaatgtcccaaataagtttctcagtttctttccatttcctataacaggaaattcatctgttacggcatcaaaggtatttaccgttcggtcggaagcgtctccgctcgctgcctcatgtgccgcctctccctgtgcctttgcatagtcaccctgtgtctgtgcatacgcagctttttcatttgccaatgttgcttttccatttgcattacctgctgccgtattggctgcctgggttgccgtatctgcatttattttcgctgcattggccgcctgtgccgcaacgtttgccgcttctgctgccgctttcgcctgttccttggctgtgtttacggtttctgcggcagagtttgcactctgggccgcattgttcgctgcttccgctttgctgtccgcattcgtagcagctgtatctgctctcgatttagccgcattcgctgcttccgctgccgattccgcatttgtctttgctgcattggctgcctgtgctgcaagattcgccgtttccgctttactggaggcgttcgcagctgccgtatccgctcttgacttggccgcattcgctgcttccgctgctgcttgcgcctgttccttcactgtatttatagttcctgcggcggcatttgccccctgagctgctgtattcgcattaatcactgcctgctctaccgttccggccgccgtgttcgccctgtctatggcctcctctacacctacggccgcctgattggctctcgtgattgccgcttccactcctgtagcggcttgattagctcttgtggcggccgcatccgcctgattcgcggagagcgtcgcccggtctgctgcctgaccggtttcgcttattttctcctcaatctttttttccaactgctccagctctgttaagcctccactgtatgtaccgggtgtatttactgtatcaccaacataaaatgcgcccttgtttgtcgcccattttacctccccgtcgccgttaaaaccacgcagggatatccataccgttccaatgtcacgcaaagcattgtccgatacactccagcttaatagaatgccctgatcgctaacggttttatcgataatacaggtatccttttgttctcctttatattccagatccaggcgaaaggttaaatcactgatatcaattccacgatgcagccggtcaatatagaataactttacttccgagttattatcataggttgttcctatctgcctttcatcaatagggattatcagctctctcccgcttacagtaatcataccttatacccctcttttattctgagtattctgcctctttcataatttttcctgcctcggagacctggtcctccgagtttttcagtacctcatatactgatctcggcatttctacctcttctccgcgttttaccagataccccacaccatttacccctacaaacacgggagcactatatttatcattgtctttaaacaggcggaactttaccagatctcgcgtatctccggaggcttcccttcctcctgcttccatgttctcttttacagtcccgttctcttttatagcctcattcttttctgctctcgctgccatatttcttcctcctttagtttgctttatgatcgttaaatgtcgatgcactctcaattcttatcatatactgctgcgacaggatttcagttactttcatcgctttccacccgattgttgccctctggtttaacggatcagcagttcctccggatcccagctgtttaataattgtctgcaaacctccgccttctacttttgttgttccataggcgttggctcccatcacaagagtggagtagacgtccacgttttcttttccggcacttgcaaatttcttcgcctccgtcgtttctacaaagcgcaccccgtccagctctccgatttctcctttatagattctttcagggtttttatatttcacgacactgataaaatccggatcgtttttgatatcatacgcgcaatcaggatgaataatcgcgaagtagcttccatcgattttaggagcattctgcactcttaaaaatctggctgcaagtttaatcgcctttacagtcagtttcatttcagatgttatttccgttcgtacgctcacctgtccttctgcatactggacattggttcccgcatttaatacttcccttgaaatcgtatccagggtctccccagcttgcgccccaattaggttaccggcttcgataatattattatctatggaggtcatggtcagtacatcagacagggatacataatctccgtactgctttacctccgcctccagattggtaacgctcagtttctttccattcggtgtcactccctcagttaatggagtcagtgctttcccaagagcatcgtattttctgaattcgattttctttcctccgtttttgggaatatctctttcctgtgcaaactgatcatgcaccaggtttggttctgcgtttcttaacagatttttgtcatagaacgttttcatctctacggataatccaccatccgtggtaacgtttgtattcatagatgtttcaaaaagtctcaaatttattttatatttctgcatggtttttcctcctactatcagtgattctttttctgcaatattcacttgccggccccgcttgtcccctataagcttataatttctccgcttctggctctcttaatcagttcaagcatctcctcattgctcattttgcttacatctattttcgatgttgaagccgcatttcctgcaatctggttttcggttggccgggaatacccggaccgtatggtgtctgccacctgcttcttcgtacttttttcagtctgtaccatgattccgctgacgatctcatcatgatggactgctttataagcgccttccacatcccatccggcgcctaaaagctgaataaagcccggattctgtaactctttttccatattaaattctggaaaatgctttctgcattctcccgcttcccggtcccatctcgcccaggccagatctctttgacggatctgttcgctccttcgctgcatctcgattaattggctgttttctgccttcatttttagcatatttttgtactgctcgactgacagcccttcttttaatgctgctgattcgtagaagtcattatcatcttctatcgccttgataatatcttccacattcccgctcttcactccgaaatgctccgaaagaaggtttataagcggtacatactcggtaagctgtctgttcagccttacggcctctgcatctcttaatgatactgcttcatgaatcctggaatcaaaaagatccttgtattcgccttcaatcaaggtttcaaattccttctgcctctctttcggtgtcttttgattcttgtttccttcctctccgactccctgcgcttcttcctgaccttcccctgcttccccttctgtcactgtggcagagccttcactcaccgtgccttcggctcctcccgctccttctccatcaaacaggtttaaggtcatcactgttctatgcttcatatagtctcctttctgttctgtttcctgtagcttatcatatctgcattttcttttcccccaccctcatttgcttatcgttacaaatgccggatactcttcattcagcatttgaaatccggtaaaaatcgtatgaattgtggtttttagttcatcctgtctctcccgtttcgccttcacacgaatcctgatatcccctgattcacattggctatccatcagatccaattttcctaaactccccatgattcttatggtttccagcaaagtacacgcaagggtggaaatagctgcacacaccacgtcacagccttgcggaagatgatttgcagcaccatatcccgcatgtcctctgatgctaattacatatcctgccttttcttgatattccattcttatcactgtcatttattctccgatctgcgtagcctgccttgtcttttcccgactgtcttgtaccctcttattttcttttttcaccccttcccccaggctattcacttcctggctcctcgtatcccctgcgtcagaaacagaaggcatctctcccgtccctaatacggccggaagaactgtttgcagccggttatcccctgtagactgggcgatgactccggccatctgctgcactgccatcttcagctgttgtacctggtcatacagagttttattttcggaaaccttttttattacctcttcttttctgtcaaaatccataatggttaatactgccagtgcctggtccgcattctccggattgaagatccccattccatataattcttttgcaagttcattggctgcaatcctgctgtatggactagccttctgtgccgataccttaatatcaaagactggctttcgaatcatgatcgtctgatccatgaatacctgcgtttgtgactgaatcattccattatcaaatgtaatgtagtttcctgttccgttcggttccgtaatgcggtaacatctgggcatatcataaaactggcgaatcagttcaatcaccatgatcacaacctgactgtatgcggcatacgtcccatgaatcatatcacggcttaacttgcttccggcttcttgcaatgccgcgattgcggaagctgccgtcactcccgatgtggtgctcccctgtgagaaatcacggttccctgaggtctctttgatttcctccaccttatcctgcctggctgttattacaatatcagacattttaggaggctctatttgcctcaaattcctttcatctacatctgaggtcgtatgtacaagatcctttgagatatccgtaaattcctcttcattaattcccgctgcatcctttatgaaatatcttggtctgtttaaaaccgcattttttaggatcacctgatccagcttatccacatattcttgtggatttaccataatatctatgtatccgaaaccaaccggcattcctttctctgggaaaaggcggtcaaatacaaaaggatacatactatggtcataccagcccctgtccttcagttctggatcattttccgaagcgtataataaaactcccggcacaaacttgcagtaatgcagaacttccttgattaccttctccccttcagtttctacccatgtacgttttttataataccagtcaatcacctgaactttttccgttgtgtctatattgctttcatagatatattccggcttataaataatctgctgtcccagaagctgttctttcaattccggatactcattaatcagatcatctcggtcacgcaaatccacagaaaaaagattcttggatttttgaatatcttctatacctggctgccagtgtatatttaatacgtcaactttctttatctcgatatccccaaggccatgttccttttccttgttccagaataccccatagattcctgttcctatcttggacttatcccagcagcaatcggaatatgcctcttcaaaatgattctgctctaacaccttcggcactacctgtgtcaagatatttgtagcctgctcatctgacttctcacggggaagaatggcaggacacgggatattgtccatgaaatccgcgtgcttattaataatggaattaaacatccaaccacttactggttttggatcattccggttctctttaccagtttcaaacctctcccaatgattgcttttccaccactcctccgcattaataatctttgtcgtataatttgcttttgcatccttatatttcagcatcgtctctaatgcttcttctatttctttttttccaattgcttctttcctgatctcctctgcttccatctcatcacctatactctcattacttgatatgttttttcccgttcttctttgtataaatcaagagggtcctccaactggaccgtttttttcaccggattacggcgtgcaatcatatgttccataagaaaatatcggcattcatcatagatatgatcttcctgtgtcgtatcaatatcctctacattcttatcatcatataccagctgcggtatcgtcctgataaattctttgcaattccggaatacatagaacatggaccgtccgccttcatcaaacgccaggcggtagtgatactgcattttaccggcgattctatggttatcaccaggggaccagtagaccccttccttttccataatatcggcaatggattccccacggctcctgtcaaagatggaagggtccgctatccctacgatttttcttcctttcaaattttcatccgtctcttcgatttccttaattctccttgcctgctcagccggatcgatcttgattcccttattacattccccggctacgcatccatataactccctgatccggtagatacatcctttatagtcaatagcgtaccagccgaccgaaaacggttttgcatacccgaaatcatagcttcttccaatcacccatccgtctgggatccggaacggcgcaatcacatgggtgttctgctgtgtatcgtagttttccggatcgtctttccattctgtaaatacctgaccctcaaatgagttccagtcaccataaagcagcgcatttcgttctgcttctggaagcatcgccagggaagcgatataatccgggttgttttccagcaaaatcggattatcaaatacagaacttggaataaaaatacgatctcttaccatttctatgttctttcctccaggcccttttatgcttaccttctgtaccattctcgtttctggcttggctggcgtgataaaccgggcctttacccatggatgacctggtcctcccgggttggccgtcgcacggatataacacctgagtccaggtccggatgatctcgcacgggaaaagagatattcatattcctcctcagcaaaatgtgttaattcatcaaatcctacaaaatcaaaatggcgtccctgatatttcagtttgtcttttgtatgctgcatatttccaaaatagatgattgctccactcggaaacctccatgcatgtttcacctcattatactttgctttggggtatgcgttctgatacagttcgtgagaccgcccgattaaatcttccagttccgggattgtttttctgaaaataatagccctgtaatatggcacatgaacttgccttaatgcctccgcaatcaaataatccgattttcctccccctgctgcgcctccgtacagagcttcaaactccgttcttgacatcattagctgctgccttccctgcggagcccatatgattttattctcctctatcttcttcattctctatcctttctttcaattcctgtatctgtgtggatgtcaaaacaaccacaccggtaccgtcttcattctccccgtctttttcaatcactttttctttccactcatccggcttcctgtttttcagccaaaacatgatagcttttatatccggttcgatatattttgtttcctctgcatattcaataacctcttcctcccgttcctttcttcctgtctcatcgtaataggtttttttcagcttaaccggcttttttacggtcacttcatatccctgggtcttttgaaacaggctgtgttctaccaatgcattagaaaaatcctttccggcatacagggcttctgacacggattcatattttttcttccatgcggccagggtagaccggctgatcccgatccggtctgcaatttcctcatcgttatacccagccctggcccatgcagtcagaacggataaattctctttattttgtgtccattccttccactgctgcctagccatgtcttaccccctctctttggagtgtagcataagcaccattccttttcccccaccctcattttactgtccagttttgtccggttttgtatggttttttcaaccgtcttttgattaaaaaatggtctttcttctaacagatacgcgcgcgcgcgtgtgcgcgcgtatctgtcttgttttccagtaatcgatgcacctatgacgcgaaagctgaaaaagcggggagattttccccgcttatcgtttacacgctttacctgctgctattctctatttttccctccagttccgaaaatcgtaaccttggtaaagatactccccgtttaccttaaatagcttcacctttgccataatttttgctttttcagccgcattgccctgctgccacagcggcttatactttccagttaatacctgacggatttctgataccgcttcttttttcgtcttccctttctccattttctccttcaggatctcccctgcaacagtctcgaaggccttttctgttttcatgtccgtaccatcaaacagatcagcagcgttctttagctctgacagcgtatatttgcttacataagagccttccccggaatccaggatatcatcataaagcgcttcctgctctgtcttccgttctatttccggatcggtttccgcctcttttcctccggaaagctgcctcacccgcttttctatcactgacttaatcagcttatctgcatacccggcttttttcagattatcataggcctcctcataagcaaaaacatccattttcatcaacgcttccgctgcacggtctacatccggatctaccatggtatcattgatcaattctgatttcactatcgtattcaatttacgggaaattgattcgttatcaattccagcctggttcaaatcctccttgatctccttcgcaagtcctgcatttcctccctcatacgcttccagcataatctttgcataccgtttcaggttttctttatttctaatttcatatttctgttttgtccattcgtaatctgcttttccatccattgcgtttaccgccgtattgatcaatccttctgcttcccgcataatactttttattggaattccagttaatttgctgcatgcctgcgcagtgtataggattacatattgcggggtcagtttgctgtccccctgatacagcttttctattttatccaatgcatatttaatatcttggaatgccgacaagtctgcccttccaggggtatatccctgtataattgaggtcacatctttcacatacgggatataagtcagcggattcattccatcaataaaattacttcttacattctcctggtatttttcaatccactttttatctttatcatcgtccctcatggcatcaatgaccgctgctgccgctgctgtcataaaattactggctgtaaatacccctgctgctctaaccatacgcttcttggctcccgttttcttctggacaactgctgcctccgcacggtaaagcatattataatttttcaacggttctgccataaaactggttgccattttattaaatccgttttcgctcctcatgatctgtgtccgatgcaaaacagaatctgccacctgcgttttatctataatttcgctaaaccgctctccaacctgctcatagaattcttccgttcctttcttaagttccgggtgccgatccatgcactcatactcacacgccctccacaaccggttccatgcaattttatctcctttctctgccagcatcatcgttgcattcacaaaacgctgttttctactgtctgtacccatgatgatatctttcatctgtcttgatacctccatgcggtaaaatccccattctttccactgtgcaattggggcatattggcagatcttttcccattgttccttttccgtaatcgtcgccataccacgcgccaggtactttggatcaatctccatcgctgcccttacatatgcggttggctgctggattgcaactcttaagttcccggctacagaagctgctttcatatttgacatgaatttttcaccaatactccgatcctgatgcacgcttccattgatatcctcaatcagctttacaatgtagtttcctccttcttttccaaatttacggtcaatcgcttctttgattgtggagccattcaacccgcgcatatccatatagttatagaccttatgcagatcggacagcggcacaacataagcatgatagctactcatctgatccgcttgtcgggtaaatacatcaaagatatcctctataatcagcggattatgagcatgttcgatgacgctttttgtcatccctaaatgtttaatactctggttttcttccgttccttctttagacaccagataatttttatccgctttaatcgggaaatagtccttggccgtaaatttttcatatccatacagctccattgatacttcatttccccatgctgcgatctcttttcccatgaaacgctgcatcccgtctgctaacgccttttgttccgctgtcagggtattcgtaatgtgcatgacgtccgcttctgtcactttaatcgatcttctgctcttttcccgttttgccggctctatcccttcctttccgactttcattccccggtcccgtgactgtggtttaattcctccctgacggtcatacaaatggcctctcgcctgatttctcttattcaactcgtagagagacataatctgtgggattgtcaggcttatcgttcctcctgttaccttaaatttcaccggctccgcatccttccccgcaatttttcggatctcctgctgcgaaattcctgtttcattcatcaggttttttatataatcatgtgtcgttttcatcaataacgttttcttgtcaaacccttttctaagcgaatcataggtacttttcattccgtctcccatgattccaaacatcgtcaagggatcaagcatatcataattaaaaagcttgtctgctgttcccatgaatactcctgtatattctgtcttgtctttcatggaatcaagctcatgaaacacctcttcggccagtaagcttacctgtcttgatttcttattgctttttagctcattcacttctgtcagtgcctttttcatggatattacaaccttttgcagctcctccatggaatatgcatctaagtcatccagcttttctacatgttccactttctttgtcagttcctcgaatctgcctatcaaatctgggtccatgtcgatataatgacttttccctgcatcatcaatcatcattccactgtcacgaattgatgccatggcacgtttcgttttttcccactctctggatcggtttacaagagggtcatcggaagaataatcaatgctgctcaaaaatccggctacgatacctctcagttcctggggaacgtgtttcgtatcatttggtttcagcagccacgtcttcatcgtatttacttccttgataatacgcttctttgcggtcctgattcgttctgattccctgcgctgctgcatcttctgtgaaaatttctgctgctgtacaatcaattcctgcttatgagcgtcccttattgcacgcatttcccgcttctgctcccctatcactgcctcatactgggcgatccggctttgcttaaaatgatccagtctctttttatattcccgctttacccgttctatctcagctgcttttttatccgcaaaggtcggcttcgggtttcttacatcgaaataactattgatcagttcctgtcccaccagatacgccatttcgtccatatttgcgtgatatgggttcacaatctgttcctgtgtcagatccaccacgtttccaatctgcttcaaacggtctgccggatgggtgatgctccggtcaaacaattccggatgctggtcagacagttcctcatagaaactatcgattgatatcccttcttttcccagtttcatttttccgaaataccgttttcgaaacccgttataatccccatcttccatgaaatccgctttatcctgatccgttatctttatttttgtttcacggatctgctttctcaaatccttgtatgcctgtgtcagtccctcttccacctgtctggattgtttcaacacacttctggcaatatccgccgcgacttccgcaacctctcttccatcgatctgatcagaacttcttattatttcgtagaattttgtgaggtttctttccagcatttctacgttggccgtactctgataggttttcactacgttcctggctatctttttaatgtcttcctgacgcatttcttcttttccggttaattcaaattctttctgcatcagccggattccctcacgaagatcttcattttcatagagtagttctaaatagaccccctgataatcctcaatatcttccagctgataacgcaatttctgatattctgtttcttcctggcttattccctccttttccattcctgactgatatctgtctcctgcctcttctaacgctgccatccatatattcctggcattggtatagctctccacgttctcttcaagtccttttgctgcctttctcacacttcccgttttcataaggctctttaatgcatccacaatatcattaagaaaggccagaatcttttcccccaatgtccggttcctatggacaatctcatttacgtagtccggatcattgaaaaatttttctgttgcatctgccacgatttcgtctataatttccgctctcgaaagccgttttcctgcccgttcatagcttctgctgtaagactccattaaatcttcaaaagacacgttctcggcctgcgtcagggctttgacagcgatatcctgatatggagtatacagatcaggggaatactcctgaataaagtgagttaattcatgggaaatggaagcattaaaattctttgagttgatcgaaattttcacttttcctttttcatacgatgcagcagcaccgctccctacatcatcaaccaatacaaaagatagtccagttcgctttccaaacgcctcagctgcctttttctgcgcctctgtagcttccaccgctgcttccaccagccctccggtcttcggttccttctgaaccatgtttctgatttcccccgtctcaggatcatatccgatttcaatgttccggtcctgagcccccgctttatatgcttcagctgcctgatccggcgtaagaactgtggaaaacattgttttcgcatcctgcatgtccatgttatagcggccggcattatagtatcttgaaaatgccttatagtatgcctcaatccctgcgtttccatcgtatgattccttgaatgcttttttccctttcgccccgtatacttctgcccacggttccaaaatgtcataactggattcagttccccggctttccataggaacaggattttggatccgttccggctcaatccatggtctttcgttctctgtttccagttccttcactggtccctgaactgatttttgtactggttccataacaggatcctggtccgaattgattttatctacctttcggtctgattcataagaatgatccatgccggtttcagtcccggtttcaaacatgccatgatgctccgcaagctcagaaatatattcattcagtgctctatcataagctccttttttccggttggtaataaattccccttgtctctggcgcgcagcatattcctcggccgtcttttgcagctcagtcgctctctggtaatcctgataggaattaaaatgttcttcgtccgtatcaattgaaccggcatagtcccggtaatccgggtgaagtgtctttcccaccgatgcatccgcacggtaggaattcattccattcaatgccatggttcctcctcccatcattccaccggagacagctcctcccagacccgccaacccaatattttttaaaatatcggtaaatgcccgagcgcgggcctctttctctgtcatgccatttttacgatactgatccagggccatatgataattcgagagctctcccattaccatctcatccgttaaagaattggcaatttcggtaaatgcttcttctgatccttctgtaaaagattgctttgccaggttttttagaaattcccgcatggactttacaggagctgtttttaattgttccaggccttctaacgaaaacttttcaaaaaatgcttcggcgcctgctgcaaatgtggcattcaagagtgcctggctgtcactccctcccctctcaagtgaatccaataacgttcccgatccggcccctcctgccgcaaccgccaggcctgcattccccagcggtaatcttaacgcagtctggccaatcgacagacctgtatcaatcatgaagtctcccagacttcccgtattttcttttattccttcccgcgccgctctttccatgtatgccggactaaaagagagatcatatggatcaagttcttttccatccgcattctttttcagagcctttacataaccggctggcgtcatgagtgaaatcccaagattcgcaattgctccctgaatcggatgttcttttgagtaattccgtatttgcggatcagctgcatggatgcttcgctgattcagttcatcggaaatcgattccagatagcgtcttccggcatcctttccctcttttccaaccttataattataaatagctttttcgtcatctgtcatgtatgcaagattatgctgtctttcctgcaaaagtccaagtgcttctctgtaaagatcaaatgtgcttttcccttccttactgctaaaaagcgggctgatctcctcacccgcttttgatatctcctgaaaatcaggcctgctcatcactgtacggttggcatactccggtatatgggccaggttccatagatggttataatcctgctgcatcgtcccaggcagattctcttttcttttggtatcttccggcactgtcttcttacgcctgttctcctccatgtctgcctgcggccctgctgcatacggcatcgatgtattcctgctttctcctgtaaggtaactgggaagatatgcagcaccataccttggcggatccattttatttcccatggcatttgccagttcacgatcttttctccatgcgtcagcctcctctgtagtccttccacggtatcggctttccgcatactgttccgccagtttatataattcccccgggcttcccgcttccaactcttttccgaaataggaatactgccggttgtctttcatttgttttgttgccttatgaggttcataccacttgggagctctcttttcaagaagatcctgtactttttggttcatcggggattcccactcataattcccttgataaggcctatactgctgcgttgagaattctgcctccggttcggatacctggctgtattcagattctatcccctgtcttttttttagcattcttcccactttttcattcattacagccattttacttcctccccatcatagacagcgcatacagtaattcatcataggctgaatgatacttatcactgtcccattttgattcatcaatcaaaccggctttcagcaatttatccatttctgattttgctgttttcagattcttcttctgcgcaacgttgtataaataattttgcgcttccgctacggtaagtttttcttcatcccttgctttgttttttgaacctgatgttggacttgatgcctttttcgccgcggcaatggccgcctgctgcttctgccagtcaaattgctgctgccaatgggcattcgcaatcgcatcctgctgcttctggtatgcatactgctccgcccattgctgtgctgcaagatcagtctgatagcttccaaaatcatttgcatattcctgattatacctgttgttataataatcacgttcattctggtaatctgatatctcatctcgatatttaccataatccaggctgtcctgattattcaggattcccagctggttgtacaattcattcccttcattcagatacttattgtataaccggtcatagatatccatactcctatcattcagctggctcaaataattgtcatatgcctgctgcccagctgctgccgcataggtcgatccatatcccccggtaagacctgccgcatttcctgttgcgtctctcatcgcacgctgcccctgctggatataattttctctgtaattcttatacaaatcactttcataaacgctgttttcatcaaatttcggccggtttagtatggtatccaggatctcatcgatctgccccttatactggctctcatacgctcctggtttattcccttccactcctgttaagatatctttataatggttgacgttttctgacggtgcatatttctgatagttatatccgctcagatatgaggcggtggtcttgctttccttctggccttcttgactggttccgcctccgctgtttcctgtccctccggttaccggccggccttcctgtaaatagcgcaataactgggtattctgttgtgctgttccacggtacccttctattccgtattccttggcgagcttctcccgctctgaatacgaactgttctttcccgtcttttttaagtaatctacaatgcttccaactgccatcttgattcctcctatctcatttctgtgctatatcctaccactttttcaattcctattaattttacccttccgcctccgcaaatccggagccggtaactctgtgaacgtcttggtatgatctggattttctggctcccatactgttcccggtgtattgtcttcaataatatccagtcttctgaatcatatttgatccagatatccgcctccgcacgttcttccagttccatgtgcagaatcagccttttcagtactttgtgttccaggcttccttctgtcaattcccctgtttccagctcccattccacccgctcatcccggtctcccgttacggtaaacagttctcccttgtgattgatacagtacaattccccattcccttttgtgaaatactgaatcctggtatcatcttcttttatccagactcctagtttcatgtcatacacatacatggtatctatcccgttcttgtcctttaccgacagataataccggttatcgtattcccctcccgccccctccatgtaaacattgtctccaagcgcatccgaaatgcgttccggctgtgctccattaaagatgcagactccacttcttgtcgcataaaataacgtctcatttacaattgcaattgttttactgcaatttgcagcaactccctgtacccccgttgttacaacctgataatttgatggcttactcccgtatatcttatgtacagcctgttccttaaaaaacatgacatatccaagataggaaacacagcctgtgaaatctccatcagatccgattgtcgctgcataagaatcagtactgattccttcaaatgcattccagtttttgggatccccaagtttagaggcatagatctcatgattttgacttgaacacccccataaccggttatcatgttcacatagaaaatccatatccggtactttccgttttatggtaatgcccgtattctgttcaaaaggttctgttaaatcccctatcagcaggatataatcctcttccttatcctgaatcacaaaggttttattgaatccttccttcgtacatccggtcatttcaaccccatcgaatttttcgaatgccttcccaatccctgtacaggatacttttatcatggtcgatccggtcacaattggttcaaacttagccttgctgctttgactccatgtggcttccagtggttccagctttttcgagtccgtgttataaacgattttatccggaaatacaattaagcaggcccccatagcggttatcactttatcggtgtcacttacatcagctactttttctccattgtaatatagacccgttccttctgccgtaacgagtccatttttataatacagtccatgtggcttttctattgtcttctgtatttttccccgttttttccgtgtcgctatcgctggatagcactccgaggacatgtttttcatatctgcaaattcattgtccctgatcacagttcctttatttatccccaggaaagaggtaatccgtatctctgactctctggggctcatagtcaaaactggcagtcttctcataagccctcctttaaatccctctgaaactatttttctgctttggaatatgggttcttcgataccacgccgcgcagctgtcatatgctgcattaaacatagctacatcattgttatagcgttctgtatcctgattgataaaatccatctttgcgtatacataattcagatatacatctttaaagttatctgcaaggaccagttctgttcccatatcatttttataatcatacggtttcacatctactgaaactccatcagctctattaataatctcctctatgatctgcccttctacttcattgatccagtctgtgatgatttctgtatcatactgctgccctttgattttattgacggtttctatcactttccccagtttcatccgattcctccacttcgtttccttcatcaatgatgtttcctgctgcaaacaatagctttgcctgctctattccctccacttttatcatgttcagtatctttaccagcatagtaatctgctccatggtaaaatatatttttttcatgtccctaattctcctaatccactctttttatccaatcgatgatatgattgattgctgttacgatctgggtatccgttgcccctgacggaatcttactgtatccgtatgtaactccaagtgacaaatctccataacttccccgtatcgtaggtccattcacaattgatatggaatttacacttaggttgcttaagcttatactggatggcacgaaatctttatagatcttaaatttccctcccacactctcgaatacctttgaccctcctattttcagtaatgaggcatcgatatcacctgttttaatgttgtttccattaatcgttgtgcttcctgattgttttaaatcattaaacgtaacatatccagtaagttcgatctgttctgcaacaagatttgccatgcggctcgtcagggtaaaattagaggaggatgatccggaagcaatcacccagtttattttctttgcggtttgttcgactgtactgatatctccctctgcattgctgatccggcttgttagggaacttgcggtttgtttgactgtactgagttctccctctgcattgctgatccggcttgttagggaacttgcggtttgctggactgtactgagttctccctctgcattgctgatccggcttgttagagaactggcggtttgcttaactgaactgagttctccctctgcattgctgatccggcttgttagagaactggcggtttgcttaactgaactgagttctccctctgcattgctgatccgacttgttagagaactagcggtttgctccaaaactgatatatttccttccgcatccttcatactaatcaaaagattctttgccgtaagctccagatatgcgatattctcaccgctctttatgtattttctcagtgcatcctcgctataattctcttctggatcaagattactaaaaatatatcttagttcttcattcagcatcagcagatatgattttattttttttatatcgtctccgcctgtatattcatttccccggtatactcccacgttttcatctcctttttttatttcattataccggttttagtctttcttttccccctcgctcatttttacctcttttattgtatttttcatagattgctttataatatgggcattctacatagtcaaaagaacagcaaaacatatccatgaatatctgctgttcttccatcgtttgaaatcttaattgatttcttattgcgaatcccatatcttttatattttcacatgtcacagtatactgccatggccttcttcctgcatgtgtttcataaaaagggcacatgatgctgtggtttggattcggcatttttattcgtccctccattttaagctgatatcatgctgtgtttttactctactatcctcctgatctcctctactacgtcacggtatgcatgacaatacaccggtggaaatccttccggtggttccatcttgtccacgctttcccgtacctctgcctgccacatatgcagatactcattctcaagccgcagattcaatatttcattagcttgctccattcgttcccgctctgcatcaccatcatttgccgccatgcataagcttattgttatcacagccaccgcaccgccgacaaacaaagctatgactataccacataaaacacccatatcgttctcctttcgaaaataattgattcaaatgacagaatttttgttgcagaactaaccggaatagctgcatggagaaatgttatctgtaattctgactatttaaaaaataatctctagtgttgcaagggccaccgctacgcgtggctctttttgttatatgtacctctgttacggtttcatctataacatcttgtattttttcaatggtatcttgtattgatgcacattctatactaaatccttgaataccttcatcaacaatcactctcatattcaaccttctttcttaaaaatcctaatttagttgtgtaacgttacgtatcgttacacataaaaaacatttccagcgccttgcggatcacccaggagatggagcggtcctcacgctggcaataggccataagccgcctaaactgtcccggctctatgcttatatcctgccgtatgtatttctctccttctgctttctttggtcttgccatgccggccgctcctttctctgtgtattactccacaaactattctttatctcgattttgccgattaacccacatcagattcgatatagacgataattccctttttccaatcgagagaatccacttttttctccgcttcctcgtcgcttagattagccacttcccaagcggtagatatgtcctcgaaaatttcattccaatcgtccttatctcgaatatatactttttcttcaccttcatagatttcgccgatttccacatttccgaatcgagagagccaatagccgcagtcatcggctacgcaatcatatgataccatcgggattactggcagttctggattatctgctaccatttcaagtaacttccgtcgattaacatatgatttgcaatcatcttcactttcggattcatacagcgtattacatccgcttaattttccgtctttgtcccagattccggcccaactcatgggcctaacataatatgtacctctgtctgtttcaccgataataagttgttccatttctaatcctcctctaccattttgttgacgtcgccaaaatggtcttacatggctactcgcgcacggcctatgttgccgccattttcgccattgccacggctctatcgttagttgtcctctttttcaacatgtacacttaacacgattcccaaaggttcaccagttatactaaccggtataatcgccttttttgtttcttccgtggcatagctaaaagcattgccatattcgttaatccaatcattcctcgcccatatgtgttctttttcttctgtgtcaaatctccgaactgtgctaccgcctggagtaatgagaagatgattcgtcttctttaggaagattaattttaacgttttaggatcaagttcgtaattacactttccaggatttcttattttctctaaattaattatggctttttctttttttatatatgggcctttccacccgtctgtcagcaaaaccgtatcaccataatctataacgtttagcctactcggattctttatggcctctatctgcatttttacatctgctgtcaatttcatttgctttttcctcctctaaatgatcgttttgttaagcaaaccgtagttgttcgtggctgtcgtcgatcctcatattcggcattctttcgccgactttgagatacggacagtttgcagataccagtgcctgcgccattatcggcaccacgctatttccgatccgcgccacctgttccccgacggggtacggcttgccctctatgtcccggttaagtatgtaatcctctggaaatccctgcatccgcttaagctcctctggtttcagcatacggaggaagatatctttcaagatatactgttctccatcaatgtcagttaccacgtttacgagaccgaaccggtcctttgttgtgatggtccccagtggctttcctgcttcctgtccgcaaccgctaccgtaatacttaattaaaaatgcggatataagcccgaaatgccccggtgaagtggtaatcgtatgtaaaggctcttcgcaactctgaccggttccgcttttataaaatttagtaacaaatgccgtaaccagaccataccgattgctggtatcaattgtctttatcggctctgtcagcagttggccgcgagaatctccttcccgcgtttccccgtgatactgaatcataaaggaaacggcgctctgattgttaactatgtacggttgcggattgttaacaacatacttaacgtatccgtttgctatccgtttcatggtggcatctgccagagggcggggccggtcaaatatggaacgtcccaaatccgaccaatcaatataatctccgcattctaaccacttctgccggccatctgctccgttcttactgtgtgtcggctccggccatgtaatccgcttcccatctctccggaagattgcataccaacgcttccgtgttgtcggcgctccgtaatctgccgctaccagttcccggctgtcaaaatcatatcccaatcgtttcatggccgctatgaatcgtttgtagtcctctccggctctttcttttattgggtgccctgcctcgtctagcggtccccactgctgtatttcctcgacgttttccatcaagataacatcgggaagaattgctttagcgtgcttgtacaccgcccatggcagaattctaagccccttgttacgcggctgacctccttttgccttgctatgactggtacaatctggagaggcccacataagtgctacatggcggccagcaacatactttttaagatcgaccttaaatatatcctcggtcagatgcagcgtatccggatgattgactttgtgcatccgaatcgcctgcggatcatgattgatagctatatcaaccggccgccccagtgccatttctatacccacacttgccccgccgccaccggcaaagcaatctataatcaaaccgctcatggtctcacctccagaaagtcttttatgctcatctgccctgcaggggcaaaattcatccacaacacttcacgcttctttgatgcgatttgggaatagcagtcagtttctacacggtaccaatcgtgtaagctgtcattatacaactcgctatcatatccactaattagtaccggccccttatgggcgtgaagaacttccagtaattcagtttgcgccccgttgtccatctcataccggtactgtttcccgtgcctggccgataaaacatatggcgggtccgcatagatcaatacattggaatggttgaagcgtttgattaattccacggccggcatgttttcaatttgcacgcctcgcagcctttcagcggccgccattattttctcaggcagattacaccaatctttcgcagcataggcccgctctctgccttgtacgtcgttcttccagcccaccttttcgccattggtccggaacccgtgtcccatattaagccgtatgtagaaattcactgcccgtccaaaactgtcctctggtaccgattcaaacgctgaatcgtatacctgccttgcgtaaggcgtgtaatatatttcccgtgctaggcgctccgggtctttcctgatccactcaaacaagtttacaacgtttccgtcgaggtcgtttacagtctcgatattggaccgcggcttattgaatagcactgcgccgctaccgaaaaacggttcaatgtagctgtggtgctgcggaaaataactgataatccaatccgctatactccatttactgcctgggtatttcataattgctttcattttcaaaaaaggaacccggcgcgcctgttttccggaaaggttccagctcctttcttaatcggtcaaatatcagttttgtgaattagtcatggttctgaacatagcttgcgatacatgacatctcacttcatattcctgtcttctcttgcaccgtttgcagggtttcgaacaatacgccttacggcggcagattgtacattttccatctaataaccattgctctgatctatccaaaatagtcctccagctctcaataataacaacggcaccgcttacagtcgctcttctgacaccgatccatacgcccaggccataaaattattttcccattcgcatggcaacgcttcttccgctttctcttcatggtttctgtcctccaaatattaatttccctgttttaaaagattctggatctcccgaatatgccgccggatatctccagtcttttctggtcccaagtcaacgcacatgtcttccacggcctccattaagtttcctaccatatcgcccaattcgttttcgacgacatattttttatatatcaaggcacctctttctgtaaaaagttccagtggagttccttcagctattcccatctctcttcttactgctttaggaataacaattcttcccaaatcatctacacgtcttacaatacctgttactttcatatcttttcctttctccaaaataacggaaatactaatatagttcacttaatgcattcagatttttcttaagtttttcatcaacatcccctatttcgcattcaagtgccttttttgctgcttgtggggatattatcgtatcctttttacagcatcctttttccgaaatttccacataaaaagttctgtctcgcacctcgtttgtgttcccgaagcataagtttcttgtttcttccagttcttctttcacgtttctcaacttatctataacccgtttaatttcaatggcttgttcaagcgttttttctgtcactccatacacctccaaagcttaatcatcaccataataacaccactgttcacagtccttgcacttctccgctggttcctctccaatcgtttcacagaacccgcggcacttgcttccttcccaacccggatgtccatactgccttatgtacaggcatggccccgtctggtaacacagaccacaagtattagacaatgatttaagtagcttctctctggccttcttctcggcctcggcctgggaaactacgccggaatagatatcgtagcttgccgcgtccaacttacggatcacgcttgacattctggcagtgcctacggccttgccgttgtccatcacccggtgcaactcctggcggctgtatccggtaaactgctccagctccgaaacagtcataccaaacagcccggccactctctttaaatctgccatgacaaaacctccttatttgtcaagtcttaattcggtaaatattaattttgacaataaaataccaaccatcgaatattgacggttggtactcttttaaaggctatcaggatttacatcgttttcgtattggttcattttacgaccgatcaagtccccacattttccacaaaaccatgctccagctatagctttgtctgtatcctctccattttcatcttttttgaaaagttcaggactaaagtctagcactttgcttccacatttcggacaatgagtaggattttgagttgtccacatatgcacacctcttttctcttataattccaaaattataccactccaaccgtctatattcaattatcaatgttcattaaattcttatttccccgccacttccccacgacatcaggcaatgcaatttttctagtgaaaccagaaactttattgtcctgccgtactcttcaaaatcctaatttgtatacttccagataagataagtgagttccttttcttcgatttcagtgattgtacaattatctcttttttcttccagcgctttcattctttcaagatcttctttactcatactatcctcctcaaaatattaatactgccgattattagttttctggccaatcactgcaccactggtattcccccaagcactcaagcgaaccaccattgcagctacacccctcacagtctttttctacgccatcttccatcatatcagcacattctttatagtcggctttcatctcttctgttaaaggtacttttacaattttcataaaaacacttcctttcataaaatattaatatgcctgtctctcaagccatttcaaagcatctgctaccttatccgctctatacgctacaatgtcaaagtcatcccgatacaaggctgcttctacacgtgtcagaaagcacgccagttcttcgtcagtcatctttctaatgcgatccgcgtttttcatgtgcttctccttccgaaaatgttaatatgcatggttttgcgccttgctggacgcccggcgcccactaaatccgttattttctgtaatctgggcttaagtttacttttcctgatatgtattcctatttcctttaaagcatggctcctctgtatcgcatacgcctccgttctgatccatgtcacattcttcgaagtaatacggatcatttgtctttgtccagtggcggtactgtggacagccatagcatggtgactctttttcaagtaagaatctcggttccaatcgttcttttaagctctcaaaatactcacctgctgccctggctgcttcccggcaatcatatccataacaggtatggcccctgctgcctttacagaatctacaagcattatgattcacccattcacgcttattttcttccaccattcctcctctaaagaactgtttaattgattaatgctgcataaaatcaccggctgcctgatatatcttttgggaagaggggctaaatgcccctccaatgccgtgacacatcgttatccgtttattcttgcgattacaaaagacttgtttacaagttacaatagaccggtctatgctataccagggctgcgcattccctggcaatctatattaagccccaacacctagatactggctatgtatctgccttagatgatttttatttgcggcagaatagaaactgattgttgtggcaggatttttatgtcctaaaatcaactggatatcttcaatggaacatcccttcattcgcagcagagttgccattgtttttctgaatacgtgagggtaaattctccgttttaagcctgatctgtctcctatattttttatgatcagccttaaaccatcttcctttacagcattaaacggccttcttaccccggcaaacaatgccggattcccgtccctgcgttcttttaaatatttttgcaggtggactcttgctacgtccgtcaaaaataccgtcctgtactcatcggttttatgagcgtagatcaatatttctcccttttcccagtcaatatcatctctctgtataagcggtacttctccgatccgcacaccagtacttaataaaaattccatcaatgccctttcccgcttgtccttacaggccacacggattttttcaatttcttctcctgataaataatcaatcggttttctatgttcctttcggattggtacggcttctaccggatttgttgtaataatcccatgcttcctaaaccatgtaaaaactgctgataaaaaacgtctttcattatttacggtccttggtttgtttccttttgcctcatatcggtccagataaaacttaatatcaatcgatgtgatgtgtcttatattcttgtctgtaacacaaagcatattgcgcatggctgaagtgtacgcctttatcgtcttttcacttaacccgtctttacgcacgttcgtttcataaagatgcattaaatagacattgtcatccatctctgtagataactccgtttcctttttcataatttccacgtagtacagcgctttgattatgacgctctcaagtatcctcagattctcagtattaatatgcggttccatctgcattaaaatttcattgataattctctccttcataagctttctccttcgtatgttgcttaagaggatcaaatatgatataatcatcttaagcagaggcggtagaaaatagctttggtcggcagttctaccgctgtttttatgctcacatttcagattatcaattccatttaccgatacaatagctttaaatacttttttaaggttctctcctttcctattccctgttagctgtatgataaggtctcacggtcctattgggataactcagggcaattcatgtcatgaccggcttccgctctcttcaccactttttccgatcttttgactattttatccgttctcttcctgctttagtatggctccattaggcactgacatttcagtaccggcgcacagatttatatactcctcaataatttttactgcattatcaaatccataacatgtacacgtgaagtgtcctgctgcctgcataccgtccatccattctctctgtgagggctgtaatctccccttgttatacttaagttctatatacaatccaatataccgcccccgcggtacaggaaggtgcaggtcaggcactccggctttcactccctgacgtttcaagtttacggcctctgtcttattcctgctgcctccgttcggacagtgatacagccatttgaggtcaggatactttggttcatgataatagcaccatgagattactttttcctgctctgtcccttcactgcgcaatacatttcctctgttcatttgtcttcctctctccattccagtccaggccctttctctggaataatatctcttcatatttcatcgtttttaaaggcagtgtatccggttgttccgtatattttacctgtaccagattatcaaacttcctgactactgttaccggttcctgaacaggtatggatacccgttcatttaagatatcccggaatatcgttctataaatcagcctgtctcctactttaaccgactcctttaagcgctcgatgtcatatttgttaatcactgccttaacatatcctttggtcataatctccctcctccccttcatcaattggaaatgctccacacggctcccagtctgtatctaccggattgagtttaaccattgtgtaacgctgatatggatatcccaacttatcaaacccattgtagagactgtctttctctatgtaataacccttacggggcttcggatttatatcccacccttttttaaccggcaccatcctgcgctccggcttcggcatgatcaggttacgactgcatgaataatgctgcttactcggattcccctcatcccggaatgtcttttcagtttctttgatcatgtactctgccagacgtttatattccccttcttcatacagcggtacaaactgcctgcggccatgatctttccacaattcccttgtaatttccagagttgtcctcttgttactcttcacatggttgataatcagatgatgatgaattcttttgtgaagatactctgtgacttgtatgtatttcaattcaaatcccattttcctgtattcttttctcaattttgtaagaaaatcacttatatatttttttgcctgcacgcgatccggtttggggtccttataggttagtatcaaatgccagtctcccggtttaaagttcgcatttatttttatcgctagcttacgggctgcctgtctcatattcgcttcctgcatctcttctttggttttcttaacctttttacctcttaccccactgtatcccttacgctctgatctagggatacattttataacttctatggttgctcctgccttatactctattaatttatatctgtacatttctgtctcccatactgcaaagttagtccttttaacgagtgagaaatgcggtcaaatccgcttatttacttgactttccagttcgtacagattataattaaattgatcttgttctgtacaaacagaccgtcctaacggacaagcgcatatagttattcccaaactatatgcgcttttttattgtcaacgtacctgtccatcttctcacgtggttccggccagaacgcgctttacttccatctgatcctcaaccgacatatggaaaagctttctctgctcggcttccttctccatttctctaatacattcatcacagtacggcatttctaccggatctaacgggcagccgcaccggcggcagttatatctgtgtctcatctcctgatcactccttttaataattcaaataccgcaatacctgccataatggccacgatacactctcccccatacgccacataccctctttccagataggccagcggcgccaggaacgtatagacggctgtcgacataagcacggacagcgttacccgtaaaaatccgtaaaccctcccggttctttcagctttccttttactcttccgtcttctcctaacgcacaccacgggcatgtataacgtttcatcttctctgcctgtaacgatacattccagcgcaatccgcacttccggcagacctcccagcgtccttcttttatgcatttttctttcctccgcatgctgtttctctcttatcctaatatttaatccggtatgtttcctgttttagtgaaataaatatatctggacatttcccttgaaatccacgttataatagatggttttctcagccctgtatatggctgcataccggttgtcttcacccagttttgcgtatttagttttcattcttttgctcttctgcgatccatgtttaagcactctgcttctcacctctaccatttttcccctgtcgggaaccgtgctgactgtcttagacatatgctctccgctcatctcctaagaatttgttgataaaatactgctgtcctttaccggtgacttttggtgttctggtagtcacattacagccgtttccgttcagatgagtactctctttgatttcaaacaaccccaactccatagcccgctgtgtcggcatattccagtctgctcccttgcgcctaatcagatatccattatcacggatccaagtaaaaaaccgctgggcacccatatctacaccattctgctttaacaacttcgccatatctcccacgaggattgatgtatggctcgccgtgacggcatcggcaaatatttctttcggtctcattcgagtgatatcgctctgtagccggttgattgtctgatctgccatctttaacgcccgggcgaagacctgctccggtgtattccatgctttttccaaatccaaaaggtactgccgcaactccattccttatcttcaatctctactgttcgtacctacctgaactcggtattgttaaaaatctgtaaatgattcattttatgtatcctcctttccttcgctgacattgctatatggcccgtatctgtccgtatcttctgctttgtctccggcgttccattgctgacttgggaatcttgacatcctcttcctctttaatctgcgcagccacttcctctgcctcctgctccatggattccgtccaccttctcaggtattccggtaacatggtctggttaataaggatacatcttccgcttctggttgatgggatgattccggcattcaccaggtttctgaaacgccattttgtgattctggtttctgggtcttgctccaataagtattggtagcattcgttaattcctcgcatttttgggatttcgcacatctatttcacctcctactcgttgtattgctttaaaattttgacaggattcatgttgcgacgctctatggataaacctgcgttgtctgtcttgcatttctctccccctccttctataatgtacttacaggccccctccagggctaagtacatataaggatggtagctgtatgcaactggctgaacttcattatcagattcttgattacattgaacaacacccttattcctccggttccgaattggaatctgtattctcggataaagggatgcgaattgaaagtgctttatcttttctctcctctcaaaaactgctcctttttacaactgctaccaacgacaaaatttatgagcaacataaggatgaagagattcctcatattgaggctatgggttttgactttaagtggcgtttttttctttccgaaaaaggtcacattactttagaatcccatagaaaagaaatggaagagtttcgcattctgagacaggaatttcaagttgtcaaagatgacagtaaaaccgccaaactatctgctttcttttcaaatggttttgcattaattgcaatcataatcagcatcattgccttgattcgaaattaatatttttctccttggcagatgttttcttttaagaatgcatctgctaatttcaaaaatcatcccaaaattttcaccaaaagcactgcaatactaattacaactgcgattccagatatcactgcactaatgagtgcttgtatttttgctcctctcgcacatcttgctatttcttttgcttctgctattaattctcttcgcattctctcccgtgatccccttgcttcttcatctatttctttcagtatgtcattctcgttcatttttctcctttctggggttatcccaatgaaattgtatatcctacttcgttattcattcggcagttttcccgcaaaactgcctttagtattgatagcattcgttaattcctcgcatttttgggatttcgcacattgcttacgctcctttctcgtctggtaatctgggctttaagaagaaattggtgtccactccaagtactccgcaaattatggcgtactcatcgagagataatctccttcccccattcaatgcaagatttagctttgatgtttcaattcctgtttctctgcttacatgggcttgtgttatccctcttttttcaaggtactctttaatcatcactccaatatacaatttttatcacctccaaaaaatcaagttttgtgatgttacgttcactataatctcatttttgtgatttgtcaatatgtttttatcgcattttttgatttttcatttacaaaatctaaataatgtggtattgtactaaatataaaggaggtactcccatgaatgaacttctagttgatagactaaaatctgcaagaattgcaagcggattaaaacagcaagatgtcgctgaaaaaatggggataaaggcgaacacaataagtaattgggaaaaaggaagaaccgaacccgatatagattcttttgtaaaattatgcgatatctataaaattgactgcgcctccctattatctgacgtatatgctttcgatagaataggaacggatatatcccttactgaatatgaccacatcaaaaaataccgtgaccttgacgaccaaggaaaagagcatgttgattccgtattggactgggaaactgagcggacagtaaccatccgcgaccttaaatccaaagcaggaattattacaaacagggaaatgcaggagatatgggacgaaatcccgaaaacgccggaagaacttgaacggatgtaccctcttgtgaagcattcagtccgcaaaaaagatattgggtgaccttgtttcaaggcacccagttatcccgaaattaaaatttttagtcttaacttataaacagtatcaattgtgtctcgccaatgaagcctacattgtagtaaatggtatgtatgggtttaaagtaaatagcataaacgtttttctttttacattttatatatccacttctcatagctagcactcctatcttctgtttgggaaagactggatgcgtatctattataactggaggatattggcaactgtacccggtacatactggaaattatttgggaaggattataactaaatagatatgcatacataggccgttgcggtattgtccaccgaagcggcttatataaattatcgaaaggagaaatagtatggcaagtatacaaaagcgtgggaatagttacagaatcagtgtaagcaatggctacacatcaggtggaaagaaaatagtagaaacagccacgtggacgcctgaaccaggaatgaaatcaaaagaaatagaaaaagccctgaatgaatttgttgtagattttgagcgcgatgtcaaatcgggaaaaaacataaaaggggcacggatgacattgaaggaattgtccaaaagctatctggatgatgtgaagcctcctgttctggcccgtacaacttatgcggactacaaaaaacgtctggaactgcggctaatacctgctttgggccacatcgaaataggaaacatccgtcagaaggacattaacgattacaaaaaaatgttacatgaaacctatattagctcaagcacaaaaaagccactctcggaagcatctatcaccaaagactgccttattgtaagtgcaatgcttagttatgcagtatctcaaggtctgttggaaatgaatattctaatctattcaggaaaggttacggggcgcaggaagccacgcaaagaggttaagccaaagtattttaccgttgagcaattaatacgctttattgatgccctggaaacgcctatagatgtggttcacgaggagcacactactacgatcagagggaaaacatatgcagtcaagccctacacgcaaacatttcgcgtaaagctaaaatggaaactgtatttttatatcgctatgtttgcaggagaccgccgcggggaaaatatatccctcacctggaatgatttgaacatggacaccagggaaataaggttgagtacatcaaccgattacgtggatggaaccatggaactgaaagacaccaaaacccataacgagcgtgaaaatacccttccctcctatgtaattgaaattgccaaagcctggaagtcagaacagatgcaggaatccatgaagctgggcgacaaatggaaggggtaccacgggaaagactatgataagaatttcatattcacacaacgtgatggaacacaaatgcatatatgcagtcccgccggggagtacaaaagaatcatccggctatacaaccaatatattgccgattctcctgaaaagaaaatccctgaaaatgtaccgcctcatgggctgcggcacagtgtcgcagctatattgatagccaataatgtagatgcccgaaccgtcgccggcatattggggcatgccgacccaactaccacgcttaatatatattcctatttttttaagaacaaaggcaaggaggccgcgggaatcatggaggaaacattattatctgcaagacttgtagtaaccaaatagtaaccaaaaaatatttatgttaactatatgatgtgaaataaaaaagaaaaacccttgatttacaagggtttcaatagagctcccggccggacttgaaccggcgacccacgcattacgaatgcgttgcgctaccaactgcgctacggaagcatcttgtttgtcagacttaactgtcggaccttagatagtatatcagcaaaggcaaaaaaaatcaacccttttttgaaaaaaatgtaaattacgagaattgatgtattagttgcaaaaacaaggggaaaaagttataatcattaacaggatcaatcgtctctaataacaggataaaggtgatcagatggaagaaagagaaatgatcagaaagcacattttcgtaagcggccgtgtccagggcgtgggctttcgttacaggacatactatctcgcccagagtctgggactgaccggctgggtcacgaatctggacgacggccgtgtggaaatggagctgcagggtaaagaagaggatatgaatcagcttttccgcagactggagcaaaacagcttcattgacatcacagactgtaccgtaaaacagattccactgaaaaaggaaagcagcttccatgtgcgcggctgaccgcagatgaatacctgcgcgtttatccgttcacagcagctcgccctataattccatatttttccagttccaatcccctcataaagtcgtatagttaccttatgggggtgaatgatgatgcgtaaaaaaggagaaaaagaactggcagacttattcgaccgggccgcggaaagcgacgagcccgttccacctgcgccggagcatgagtttcaggcgattctggctgaaatgaaacgccggggaattgagccccgcatccgacgggaactgaaggaaaaggaaaagaaataggcggtcctcacagaccgcctgctccttttcctttattcaaatttcggcctgcgtttccgcgtatcccgccacttctttgtcccaggtcataatgtggttccaaagccactcctccacgttctttctcaccgcatccacaaacgcttcgctgggcccctcttcctcctccagcatagcccgcagatcttccacggctttcttaaatttctcatgttccagatggtgtgctgaaagcttcgggtatccgctcttcttctgaagtgtttcctcctcggtaaaatggtaatccgtataatccagcaaaaagtcgagggttcccaccgcggttctcttttcagttcccggaacacattcctccgccagtctgttcacacggccgatcagttctctgtgctgcgtatcgatcatttcatttcctgtcaccaggctcctgtcaaaagtaatgctcattctgtatgcctccttgttgttcatcaatcatttgtgtttcagacgcttcttctgaagcttccgtttactccggaagcaccatcacccatcgtccctcttccggataaaaaatcagcttaaactcctgggtcagcccgccgatcacagcccggcaggcgtattccatggacgggattccggaataacacttttcttccccgaaccggaccgtcacatgatttaccgtctgcatcatcccatcatccccttcgaatttgaaggacaggggcttaatcactccggagctggtaaaccacgccttgcaggcgatctttatctgtctgccggtcagagtgccgctgtccgctttttccgtatttgtccctattccgaacgccgacatgtcactactcctttaaagaacttcctgtctgctgtaatccaccgtgcgcttctccctcgcaattcctccgcccatgtgatcatgtacggctgtctttcccggatgctccgggagaaaggctgcgcgttttacagcatcgttgccgaagcgcctccggatttcatcgactgccttatccattctctccagcttttcgtaatccatgcggtcaaaaagcccgagctgtctggatttctccgatgaaacacggctcgtatgaatgcccagatgacggatcggcgtcttatcccacgcctcgtcaaaggcccggcaggccgcttcatacaattctcttgtaatactggtggacgtctccagagagatctggtgggaatggtattcaaacagatagtcccggattcctaccgccaccacgccgacttttacaccatccttcctgagtctggctcccagtgtctccgccagagacaggagaacgagttttgccgtttccgcatcacagacgtcgaaggccactgtggtggaattaccgtatcctttgttgggcggagcctcggcttccaccgccgacaaatcaatgccgttggcaaagccccagatcacttctccctgttttcccagatgacgccttaaaatatccggatcactccgtgcgagttcaccgatggtggtaattccgattcccttaagcttccggtaagtcgcccggccgatgaaaaaaagttccgacacggggagcggccacatcttcatcggaatctcctccttccacagcgtgtggacccgattcggcttcttaaaatcggaagccatcttcgccagaagtttattattcgccacaccgatgttgaccgtaaatcccagttcgcacagaatcctctcccttatcttttctgcggcctccttcggcggcccaaacagagctctgctctccgtcatatccatatacgcctcatcgatgctgtactgttctactaacggtgtatactcctttaagagccggatcaacgcatcgctggatctctgatagagattgtagttgggcggtaccaataccagttccggacactttttcaaagccgaacacaccgtctaccccgtcttgatcccgtatgtcctggccggaatggactttgccagaataattccgtgccgccttgtcacatcgcctcccactgcggcggaaaccgttctcaaatccaggcggccgcctaaatgcttcagccggtaaaccgcttcccaggaaagaaacgccgaattcacatccacatgaaatatggtgcgctccatcaatcatcacctcgatactattgtatcgaatatatgttcgattgtaaatggaaagtaaaggaagccttcacagctccctttactttctcactctattcttttaaagcacctttttcatcagtcttcaagcataaagtcccctcgaacatggcaccgtcttccctgacccggtaaagctctcccttccagataatccactgatctttggccatggcgccgtctgactttaaataataccatttcccgtcagatccggtcttccaggtgtcgtgcaccatcatgcccgcgccgtcaaaccagtaccactgatcaccgtcttcataccagtcattggccacatagtctcccgaatcaccgagatagaaccgccagccgccgtcctcctccagccatccggatttcttttcctgtacagtaattccataatacagtgcgacggcatcggcttccgcctttgccagacgttccagattcgattcctttaaaagccatgcggcgatctgcgcgttcgtatgaaaggaatgctccagaatcaaccccggagtccccacagaggccgctccgcggagcactccgtaataatccccgttctgtcctcttctgtgctcaatcctggctggctgcttcgtcttcatcaccttttccacacactgcgccagggccattccgatcccatctgcgcttccattgatctcacagtaggcggccggataatccacctgattattcactccggtcccaaccgcgttggaatggtcggacaggaacagatcacagcctttcgactcggcacctctggcaaaaaggcccttttcttcatcctgccgccgtcttgtggtaatcacttcaattccatactcttccagatacttcttctgcagaagatgcagtttccataccatgacagactcgtaataccgatgatctgccgggctctggttataccggccctgatggcctgcgtccaaacatattttcatatcactgctgactccttttttacacttatactacaggatatgaaactttgggacaggtgttgcatcaggctcctatgacctgcgttctctggcactgcggtataactccgcgacccgctccggctgctccagacagttgtatacttcctctccggcccgcacgctcttcgccggaatcagaagcgggttccgctttctcagttcctcaacgatgcgtgcggttccctctttatcgtactgccagttatatacgtcatgtatggtgccatcctttaacacaaagaaaatgctctttccgtactgaatcttcttatatgtaattccattcatataaaacgcagccgccatatcttcaatcctgatcgggatatgatccatctgcttgaaccagtgttctgtcaaaacccagctgaaggcggcagagtttttcgccagtttcctggaaaccgtatcgtagcagctgtccgattccagcacttcccggtcaaattcttttaactggtccggtgtgtaaccgctcttttttgaaaaatactccagatatgtacggatacgcctccgcctcataaagattccgattatggccaaaagcgcgcttcccgccgcaaccgcagcaaacagagtcaggccttccgcagtcaccacgtcctttgtggccgcaatcagaagcacacagatgccggcaatcaaaaatcctgccgcagtcagcgccgcactgccgcctccgatggagcggatcttctttaagtaactgccatcctttgtaacacaatactttttaaaattctcatcaaccggttttagcatcctcttccccctgaaacttgtattatttttcatgatatcatgaaagactcccgcaagcaggattctccgcctgcggcgggtcgctttcgcggcatgatttcttaccgccgcagggcgatcctgccggagggcttttttgtatcacaggaatactttcctgtgatacaaaaaagcttccggattttgtctttccgaaagctttttatgacctatccgagaatcgaactcgggtttccgccgtgagagggcggcgtcttgaccgcttgaccaataggccacgtatcgaatgttaaccaaaaatcgtcgaggcgacaagattcgaacttgcgacctctgcgtcccgaacgcagcgctctaccaaactgagccacgcctcgatacctttggtagtataatataaaaatgatggattgtcaactatattttggaatttttttaattttttaaaatataggaaaaattctactgctgttccactgccgtaaagcccagatcgtcgaggatttccactgctttgtcgtaatccttctcttcctcgatcatcacagtcttggtctccaaatccactttgtgaccgattccctcgtgatccaatcctttgttgattcttgacacacacccgttacacatcatttcatcacagcgataagtcttcatagttttttctccttttctttttattgcagtatgcaaatcacttcataaccttctgtatcgtcatgcacagctcatcgaccgcctctaaattgccctcctgaatctgctccacgacacagctcttgatatggctcgacagcagcaccttattaaaactgttgagtgccgcctgaaccgcagatacctgtgttaagatatccacacagtaccgctcgtcttccaccatgcttttgataccgcggatctgcccttcgattcggtttaagcggttcaataagtctttttcctccgcagcctggcggtgcttgtgcttcaccgcacagtcacacgtgtgttcctccataccatacctccatttcgttttcccttatagctttaccgtctttaaacgaagcgcattgctcaccacgcagaccgaactgagagacatggcaaaccctgcaaacatcggatttaacagcgggcctccaaataagtatagcacacctgcggccacagggatacccagactgttatagaaaaatgcccagaacaggttctgtttgatattccgtatcgtaagccggcttaatttcaccgccttatagacgtcacgcaaatcggatttcatgagtacaatatctccggattccagggcgatgtcgcttccggagccgatggccgtccccacatccgcggataccagcgccggtgcgtcgttgattccgtctcctaccatcataacggtttttccctgcttctgcagagactccaccacattggccttgtcttccggcagaacctctgcgattacggtatcaatatgggcctgtttaccgatataatcggctgtcttctgattatctccagtcagcatgcagactgtaattcccaggcgctttaactggtccactgcctccacgctggtctccttaatggtatcggcaacgcagatgatgcccttcagcttcccgtctgcgatcagatacatcggtgtctttccctgattcgccatctggtgagcctgctcctttacaggatctcccatggacaccttcatctgttccacaagccgttcattgcctacggccacctgactcgttccaagggaagcgatgattcccgcccccgtcacgctctcgaacttctccggcatggcaagctccagcccctgttctctggccttcaagacgatagcctgccccagcggatgctccgacatctgctcacacccagccgccagtttcagaagtccgtccgaagtctctgcctgatccagaactacgatatccgtaaccttcggtttcccctctgtaatcgtaccagtcttatcgaatacaaccgtgtctaccttatgggcagtctccagcgcctcaccgctcttgattaagattccatggccggctcccagtccggttccgaccataatagccgtcggcgtcgccagccccagcgcacacggacaggcaataaccagaactgccacaaagatcgttaagacaaaggacagctccttgccgcccaacagccaccagagaagggccgcagccactgcgatgcccataaccgtcggaacgaagtatccggcaaccttgtcagccagcttggagatcggcgccttttttccctgcgcgtcctcgatcatcttaatgatcttggaaagcgtggtgtctccgcctgtatgagtaacctccatctccatcgctccgttataattcatacttccgccgatcagagcatctcccgcctgcttctccacagggatactctctccggtcagcatggattcatccacactactgctgccgcctgccacaataccgtccaggggtatcctgctgcccggtttaatcaggagatgctggcccactctcacgctggccgtctccacttcccgttccgtgccatcctcatagagaatcgctgtatccggggccagttccatcagctttctgatcgcctcggaggtctttcccttacttctgctctccatgtatttgcccagcatgacgagtgtgacgacgactgccgccgactcgtaatagagatgatgggcattcattggatttgatggaattgtaaccgtcatgcagaggctgtagataaacgcactgccggtgccgatcgccaccagagaatccatgttcggattgcccttgaacagcgaccgcagtcctaccagataaaactttcttccagcaatcagtaccggaaccgtaaggatcagctgcgccagcgcatagttcagaggattgctgtccatatggaggaagtgcggaagcggcagttcaaaggggagcatgtgtcccatggatatatacagaagaggaaccgcaaagcaaatggccacaatcagccgtctcttcatcgtatcgcgctgctgctcctgcttcccccagttttctttctcctgagccttactgtccttctcctccgccagagggcaggcgccgaatccggctttctccaccttccccataatcatctccggagtgactttcgtctcatcataggtgatggtcatcttattcgtcgttaaattcacgtcactcgactccaccccttccagttttctcgtgacccgttccaccgcactgctgcaggctgcacaggacatgccttcaatatcgtaaacttctgttttcataagatcatcctttctcatatacccctatagggtatatttattatagtatgatttcttatctctgtcaatgggatccgtaattattatttctcaataagcagctgacattagctgtaaacagtaacaagattcccgtaaaacgctgaatttatgcttgcaatgccattagaaatcgcttgtataatgtttaggccgggagcagctgttaaaagaattcggtatttagagatttcaattcatttcgaatgccagactgcaaataaacggagctgttctaaaaacattatttagaacagctccgttttatttcgtcctacactcttatggcctctctctgaccagcccgcgcatttcttcaggtaaaaaatcaaactgttaaaaatcaaacagcgacagctgattcgactccggcagttcccctaaaagtcccagatctgccatcagatcgcacaccgttttactaaccttcgtcctgttcctaaagtcttcctttgacaggaactttccgtcctttacagcatcaaccacggcatcggccgctttctcaccgagaccgtcgatactgctcaaagaaggcatcagcttcccgccgataatctgaaaatgacgggcctttgcctgatagatatcgatcggtgtaaaatcgtagcctctcgcatacatttcctgaacaattctcatatcgcggagtgtatcctgttccttctttgacagcgtatccatccgcttcttatagtccgccaggtagtactccagcttatcacgtccctggcacatcagctcataagaaaagccgttcgcccggatactgaagaacgccgcatagtatgccagcggataaaataccttgcagtaggcgatacgccacgccatcataacataggcggccgcatgggctttcgggaacatgtatttaatcttcttacaggaccagatgtaccagtccggcacaccgtggctgatcatctcctcctcccattccggttttaagccttttccctttcgaacgctctccatgatcgtaaaggaaagaccttcctccagtcccatggaaatgagatagatcatgatatcgtctcgggtacagatcgccgtctgaatcgtcgccttcccctcctgaattaaggtctgggcgtttcccagccacacatcggtaccgtgagccagaccggcgatacgcacaaggtcggaaaaatacttgggctgggtatcaataagcatctgcatggcgaaatccgtaccgaactccggcacgcccagcgctcccagcttacatccgccgatatcctccggcgtgatccccagagccgatgtatcctgaaacagggacatgacctccctgctgtccagcggaatatccttaaccggatcgaagccgattaagtcctgaagcattcggatcatggtcggatcatcgtgcccgagtatatcgagtttcagcaggttatgatcgatggagtggtaatcaaaatgggtagtgaccgtcatggttgtcatatcgttagccggcctctgcacgggagtgaaggaataaatttcctccccgtggggaagcacgatgataccgccgggatgctgtcccgtggttcttctcaccccgacacagccctggacgatacggttaatctcacagttccgtttatgtacgccgtgttcctcatagtaattcttcacatagccatatgccgtcttatcggccagcgtaccgatggttccggcccggaaggtctggcctttgccgaagataacctccgtgtagtcgtgggccttactctggtactcaccggagaagtttaagtcgatatccggctctttgtctcctttaaatcccaggaacgtttcaaaaggaatgtcgaaaccgtctttcgtcagcggatggccgcagaccggacaggttttatccggcatgtcacatccggccataccggtatactttttcacttcctccgaatcaaaatcatagtaatgacagctggcacagtagtaatgcgggcttaaggaattaacctccgtaataccggacatataggcaacaaaagaagagccgaccgaaccacgggaaccaaccagatatccgtcctcgttggatttccacaccagcttctgcgcgatgatatacataaccgcgaatccattggaaatgatggagttcaattctcgttccagacgctccgtaacgatcgtcggcagattgtcgccgtagatcgcatgagccttatcataacagatctgccgcaaatccccgtcagagttttcaatgacgggcggacatttatcagggcgcaccggagagattttctcacacatatcggcgatcttccttgtattcctgatcactacctcttccgccttgttggggccgagatactcgaattccttcagcatttcctccgtcgtgcgaaggtaaaggggcgcctgttcatcactgtccttaaatccctgtcccgccataataatccggcggtacacctcatcctccgggtccagaaaatgaacgtcacaggtagcacagaccggttttccgaactggtctcccagttccacgatcttcttgttaatgtcgatcaaatcctgctccgaattcacggtgctcttttcatcccggaacataaagctgttgttgcccagaggctgaatttccaggtagtcatagaaccggaccagtctggcgatctccgcattggagccgccccgaagcagtgcctgatacagttcccccgcctcacaggcagatcccacgattaagccctcccggttctgatttaacaggctcttgggaatcctgggccttctggcgtaataatcgatatgggaccaggagatcagcttatagagattcactcgtcccacatcattggtcgcaatgataatcacgtggtaagtcggaagcttcttgatcatctccggagtcattgtctttaagctgtttaactcggtcagcgtctccactccgcgctcccgcagcatctgaacaaacttcacgaatatctccgccgtacagcccgcgtcatccaccgcgcggtgatggttggccagcgagatattcagcgccttggcgacggtatccagcttgaatctgttcaaattcggcagaaggaaccgggccagcgtcaccgtatccagcactgtaggttcaaaaggcagccccagaatctccgcatttcggttgataaagctcacatcgaaggaggcgttgtgcgccaccaggacagaatcctggcagaactccagaaactgcggcagaatcacgtcaatcttcgggtaggaaagcaccatgttgtcattgatgctggtcagctgttcgatctcaaagggaatcggtacgtccggattgacaaaggtactgaatctgtccgtaatcactccgtttaccactttgacggcgccgatctcgatgatccggttcttttccgggctgaagcccgtggtctcgatatcgaaaaccacgtaagtatctgcaaatgtctggtctttgggattatccaccagcagctttagatcgtcaacgagatacccctccaccccatacaggatcttaaaggtatcgcctttgtccagggcgtggttggcatccgggaaggactggacgcacccgtggtctgtgacggcaatggccggcattccccactttttcgcacgctttacgatatccttgacctctgatacgccatccatatcgctcatcttcgtatggcagtggagctccacccgtttctccaggcttccatccatccgcttgcccgtgaagtcctccgacttcttaatacccaccacagagcccagggtcagttcgccgtcaaacttgtcaatagtcgtcacacccttgatcttaataaacgtccccgcctggacggccgcctttaagtcatctaactgctcttctcttgcaaacatctttacggtaatcgtatccgtaaagtcggagatatcgaagatcataatcgtctttccgctccgcagttcccggctgtccaccataagaatctttccacggatggttacctcgccgatctctccgtcgatcttctcaatctcaatcgtctctccctcaaaatcacggccatagagcacgtccggattgtccgaacgttttccgccgtagccgccatagccgccgtttttcttatagtccttatagtctttcttctgttctttctttccgttatctccgtttttatcccgtttgttctcatcctttttgccgcccatgcgcagaaccggagcccctgctccgccattttccgccaaacggcgaggagaaatctccccgttatccgcagccccctgccgggccggcccctcatcgaagggcacttccgccgaatatccggcagccagcgcctctaaagaagctgcatccgccatggaggggccgccatagccgtcctccgttcctgttttcggcagcgcctgctcctcgtttaagacggcagccagggaggtcctgctgacgatctcttccacctcacgctgcatctgaagctccttctgcttcgccagcgcattctccttcggctccacgtactcatagcgcacctcaatcggaagaccgcagcgctcgaaaaagatcttctccaggacgcgctttaactcggcttccttttcatgggtaacaatggtgtcttccaccgtcattttcagcagatccggctcaggaaactcatactccgtcttccggaaaatattatactcaatgatgctgtaattcttaagctccatcaggatgctgtcccggtacacggctaacagcttctccggcgtgtactgaccggacaggcggaatttctcgataattttaatcgatacctgtttggagggaaagagctggtccttaatgcccttctccagtccgtagatattctgtttgtggatcagtctggggctcacgatataaacgcgaatagagcttctatccctggtggaagtgaccttctcaacttccaccagatttaaaagctcccgcagttcatccgtgatattcagatttggaaatacatccaaaaatgcttttgtcattcaatcacctgttgctttctgccaaacgttctgctttcatcccagctttatcagctcttctctcaaagcgtcgagtaagctctcttcagggactttccggataatctcccccttacggaagagaaggccttcaccgattcctccggcaacgccgagatccgcttccttcgcctcccccggaccattgaccacgcagcccataacggctaccttgacgtcgagatggtcgaactccgtcaccatggcttccacccggttcgcaagggatataagatcaattctggtccggccgcaggtcggacaggagaccacctccactccgccctttcgcagacccagtgtctttagaatctgctttgcagtcatcacctcttccaccggatctccggtcagggaaacccggatcgtatcaccgattccctgatgcaggataattcccagcccgacagaagatttaatcgttcccgagcgcacagttcccgcctcggtgatccccacatgaagtggataagcagtctgttccgcaatcagttcatgggccttgatgcacatcagcacatcggaggacttgatgctgatcaccagattgtcgtatcccatcgcctcgatcatgcgcaccttcataagagcgctctctacaatgccttccgccgtcaccccatgatacttttccagcagttccttctcaagggaaccgctgtttacgccgacccggatgggaatcccatattcctttgccttatccacaacggccctgacccgctcttcgctcccaatatttccaggattaatccggatcttatccgcaccgttctcaatcgcagccaacgccagccggtagtcgaaatggatatccgccaccagcggaatatgaatctgccttttgatctctttcagcgccccggccgcttccatggtcggtacggccacgcggataatatcgcagcccgcctcctccagcgccagaatctgggccaccgtggcttcggcatcctccgtctttgtattgcacatggactggatcagaatgggatttcctcccccaatcttccggtttccgatcgaaaccgtcttcgtctgttttctgtccgtcatcgctctttcctccatcggtatactgtttttttcgttttccttttccatgccgctgttacgtaaagcggctgatatcattaaatacaacgaacaccatcagagccataagcgccatcatgccgattaaattcaccatgccttctttttccggatccattcgtttaccgcgaaccgcttctatcactaaaaatacaagtcttcctccgtcaagcgccggaatcggaagaaggttcataatccccaggttcgcactcagaagaatacacatgctgagcacattcatgatggctgccatcacgcttaccgtcagccctgcctttacggaatcatcgatcataaccacgattcccaccggaccgcttaagtcattgacactggcttttccagacaacagcataccgagactcttgatggtcacagtgatatcgtatttcacttcataggccccgtatttcaccagttccaggaacgaagacgtccggacattgaccggcgacacagagatccctatcatatactggttgtattcttcattaaactccggtgtcacaagaaccgtgccccgctcttttctgccagtctgcgcgtccgtccgctcataggacacccggctcatcttctcatccggttttaacatgcggtaaaggatataatctccgtaaaccgtcatcttctcctcattcacgccggtaatcacatcccccggcttaagtcccgcttcgtaagccggcgagccttccgtgacctccttaatctgagtgacgttgtatccgcccatcccaaccagaatcagtgccaggaaaaaagcgagtataaagttaaagaccggaccggccgcgataaccgccattctgcccggaatgcttgcattctgaaaagcgccctccgccggattctcctcgtcctcaccgagcatcatacaggagcccccgatcggcagcagctttaaggagtacgtcgtctccccttttttgacatggaacagcctcggtcccataccaatggaaaattccacaacggaaatgccgttaagttttgcaaataaaaagtgccctaattcgtgaatcagcacaatcagtccaaatacaagaaccgctacgataatgctggacaatctaccacctgctttctatatagtcataagccgaagcctctgcttccagaatctcatctacagatggattctctttcacagtatgccctttcatagccccctctatcatatccgtgatggtaagataagaaatttctctgtttaaaaattttgcaacggcccgttcattggccgcattgaacaccgtcggcatggttccgccgattcttcctgcctcataagccagggcaagccccgggaaatttaccatgtccggcttttcaaatgtaatctgtccgatactccagaaatccagccgctctcccgccaggaaacggcgttccgggtagtaaagagcatactgaatcggtagcttcatatcgggtgttcccagctgcgcaatcaccgcaccatcgtcgaactgcaccatggaatggatgacactctgaggctgaaccacaacctgcacctgatccatggagacgtcaaataaccagtgcgcctccatcacctccaggcccttgttgaccattgtggaggaatcaatggtgatttttcttcccatcgaccagttagggtgctttaaggcatcctcaaggcgcaccattttcagttcctctctcgtctttccacggaacggtccgcccgacgcggttaagagtatcttatgtaccgcttttttatcttccccgttcaggctctgaaaaatagcgctgtgctcactgtctacaggtaaaatctttacacccttttcctttgccagaggcataataatatggccggctgtcaccagcgtctccttgttggcaagcgcaatatcctttcccgcctccatggccgcgatggtaggccgtataccgatcatgcctacgatagccgtcaccacgatctccgcttccgtatccacagccgcttcgatgagtccttccatcccgtatacgacctttaccggcatatccttaaccgccagggcaagctccttcgccctttcttcttcccacacacagacgatctccggatgaaattcccggatctgttcttccagacgcgtgatattacttccggccgccagagcggttacttctatatccttctgagctcttaccacttccagagtctgtgttccgatcgaaccggttgaacccagaactgcaatctttttcatgccgctgtttcgctccttttatcgtattcgcatcatacctgtttcgtattatcttatcgcagaaaagtcactgcaaagaatatggccggcgccgtaaacagcatactgtcaaaccggtccagaatgccgccgtgtcccggaatcagatggccgtaatccttcacctgatgattgcgttttatcgcagatgccgccaggtcgccgatctgggaaatcaccgccgcaatggcacaggccagcgcgcaggctacttgagggttctgcacttccgccatggaggcgccgaacaccatcgcgtaaaggaatcccagaagcgccgctcccgccacgcctccgactgccccctcaattgatttcttggggctcaaaaccggcgccagtttatgcctgccgatcagcattcctacgcagtatgcgcaggtgtcgcagccccaggagctcaaaaagatcagccagaccagatactttccatccgccattacacgaacctggtacagataagacagcataaccgccacataaaagacgccgaagaacgctaccgtcacttcctccgtcttatatttggggaacgtaaagacatagatggtcatcagtatcataagaaatgcgatggacatcagcatcatgtactgctctccgtggaaccacaaaagcccataataggataccacagtcagatatcccataactccgatcacattcttctgtatcttcataacacgatataattcaaacaaccctatcatggaaatggccacggtcgctgcaaaaagaatcattcccccgcttcccacaacgacaagggcgatcagaaccaggacaattccgctaatcaatctggttgtaaacatcgcgcttcctcccttcggactatttcactcctccaaatcttctgtctctactattgtacgcagcaatcgcctttttcagttcttctttattgaaatcaggccaatagcagtccgtcacatacagctccgtataagccagctgccacagcaggtagttggacaggcgcagttccccgctggtacggatcaaaagatccggatccggaatctccgccgtatcgagataagaggagaacactgcctcatccatctgatccggagtaatcttcccatctgccgtatctttcataatctttctggccgcccgcacgatctcgtcccggccgccataattaacggcgatcacgaaggtcagtcccgtattattctcagtctctctctccagacggttaatgccgtcgatgatatcctgatcgaaacggcttcgctcaccgatcatccgcacacggacattgttcgtcttggcgatctttaagagtcttaccatatagtagcggaacagctgcatcagcgctcccacttcctcaccggaacgcttccagttctctgtggaaaagccgtagacagtcagatacttgattccaattctggccgcatcctcaacggtacgttccaccaccacacagccttccttatggcccatgcttctgggcaggccgcgtttcttcgcccagcgtccgttgccatctaaaatgatggcgacatggtccggaattaccatattatctatattcacttccattattttctccttcttccttccaatccgcactccggttccacagataatcccgaatcgcacaacagccggaatggtatgaaacataaacaggacaggcactttgaaaatccccctcacttgcgtgcggcggaatcatgcctgccccggttctatctgttatacggtaagaagttcctttgacttcgcttcgatcgctttatcgatcttcccaatcatcttatccgttaatttctgaatatcttcctccgcctctgctaagtcgtcctcagaaatctcatctgccttctgcagtttcttaaagtaatcattgccgtcacggcggatattgcgaacagcaaccttcgctgcctcacctttcttcttgacgtccttcaccagttcttttctgcgttcctcggtcagttccgggaaaacgaggcggataacgctgccgtcgttggtcgggttgatgcccagatcagaagtcagaatggctttttcaatcgcctttaagaggctcttttcccatggctgaataataatcatgcgggcttccggaacattgatgttgcccacctgctgaagcggagtgggagttccgtaataatccaccttgattttatcaagcacatgcgggtttgcacgtcctgcgcggatcgtcatatagtcgctctccagcacctctaatgtcttattcatcttgtcctcgtaaacctgtaaactctcctgcatattgtcctcctagtttatgcggtcacaattgtgccgtttattttcccctgcatcgcgtcagcaatgctgtctttttcattcagactgaataccgctaatggcatgcggttctccatacacatgatggaggctgtcagatcaatcacacccagctgcttatcaatcacttcctgtatggatatctcatcgtatttcttcgcttccggattgatcttcggatcgctgtcgtaaacgccgtcaatcgctttagcaagaaggatgcagtccgcttccatctcgatagcccgaagagcgattccggtatcggtagaaaagtaaggatggccggtaccgcctgcaaaaaagaccaccattcccttttcaaaatacttgtttgctctgtccttggaaaaaagctttgtcatggagccgcactcaaacggtgtcagaatctgagtcgtcatcccggcacaccggaagatctcagatacatagatgcagttcataaccgtggcaagcattccgatctggtctgccttggtacggtcgatggcattgctcgtccttcccctccagaagttgcctccgccaatgacgatgcctacctcgacaccagcatccacggatatcttaacctgccgcgctacttccttcacagtctcttcatcgaagcctgttttattcggtccggcaagggcttcaccgcttaatttcagtaatacacgtcttggattcatagctatcattctcctgttattgaagcgttttccgctttggtattgtcatgaatgattatagcatatttctttttggttggaaagagaaagttttccgcggaaagagaacgctcttcccatgacggaaaaagtccccgtaagaagttctcacctcttccggggaccttgttattcatttacgtcagacaattaatccattgtcgcatactggaagaaccagtagccgtatggagaatgccatgttccttttaacttcggatcctgtaaatagaaatcgttgtagtaagcaattggagccatcgctgcgtctgcaaggatcatgttctctgcttcatgcagctttgcataatgctctgcaacatcagctgtggagttggcatcgtttaacatcttgtcaacttccggattgctgtacttaccgtcgttgtttccgccgccggtaatcattaagttcagcatgttggaaggatcatcgtagtcatatacccagccgttacgtgcaacctggaaatcgcctgcacgacgggttggtgtaaaggtagaccactcaacaaccttgatatccatgttaatgccaagagattctttccagcagctctgtaagtactcagccagtggtttgtggtagccggcatcgttggtcatatattcgatggtcgggaagcctgctccatccggatatcctgcattggcaagtaattcttttgcttttgcaacatcagcgtcgtgatccgttacgttgaagaagtctccgccgttgttcttacgtgtaacctcttcgaaggaagaaccggcttctgcgtcagaaaggccaggtccaacaaagttggttgccggggaataggttccctgcataactgtgttggcaacgtaatcacggtcgatggcaaggcttaatgccatacgtacatccgggttgttaaacggttctttttctgtctggaagctgatgtaatatgtacccattaaaggatctacatggaaatcttcgttgccgcgcaggctcggaacttcttctgtaggaacgtccttgatcatggatacttcaccagtctgatatgcactgtaagcagcattggaatcttccatcaggacaaactttaaagtattaactgtaaccttatctgcattccagtagttctcattctttgcaaacgtaatatgggaacctggtacccactcgatcatctttaacggaccgttggaaatataggtttctggtgttaaagtccactgatcgccgtttgcttcaatcgttgcctgctgaacaggaaccatggagccgtgtgtaatcagcttggagaaatatacacatggagatgccatctcaacaacgaatgtatcatcatccggtgcggatactccaagtgcgtctaaattaccttcagatgcttctttgtagccttttacgtagccaagcatatccatagcatacggtgcagctgtgttcggatctgcaagtctcttccaggaatatacgaagtcattcgctgtaagaggtgttccgtcactccactttaagcctttgcgaagatggaaggtataggtaagtccatcatcagaaacttccatggattcagcctgccctggaacaatcttgttctctgagtcaacgctcatcagagtctcaaaggcatgaagaatcatgtttccgccgtctactgcgctgtttaaagccggatcaacagtctcaggatcaggtccgatctgaactgcaaggtcaaggccagcgcctccattttcagccggtgcagcagtctcgccctctgcggcagcagctgttgttgtggtatcggcagcttttgttgttggcgcatcagcggtcttattgcctccacaggcggtaagaatcataccggttgccataacagctgctaatacaagtgctgtttttttcatatcaattcctcctctaaagaatttattcaaattagcacagcaatactttacctgactactgtgctgatttgtcttttagcataccacaaaaccttaggaatagcaattaaaaattaatttactttgtccaggtggtggcacgccgcatagtgacctgtggaaacttccttccactgcggctcttccgctgcacagagctcgtcggcatacggacagcgggtacggaagcggcagccgctcggcgggttaaccgggcttggcacgtcgccttccagaacaattctcttagattttctgctggtctccggatcagcaatcggaatagcggaaattaagctcttggtataggggtgtacgctgtggaaggtcagctcatagctgtcagccagctccaccagcttgcctaaatacatcactccgatccggtttgatatatgttttacaattgataaatcatgtgcaatgaaaagataggtcagtcccagttcctcctgcagctgttcaaacatgttgacaacctgggcctggatagacacatccagagcggatacaggttcgtcgcatacgatgaactccggattcaccgccagggcacgggcgataccgacacgctgacgctgtccgcctgagaactcgtgaggatagcggttcgcatgctcggaatttaagcctaccgtggagagcacggataagattctttcatgacggtccttcttattggccgccaggcgatggatatcgatcgcttcaccgacaatatcctcgacggtcatacgcggatcgagactcgcatacggatcctggaacacgatctgcattttacggcggtacggaagcatattcacgtgggtgatatccttgccgtcatagagaatcgtgccatccgtcggttcatataaacgaagcagcgtacggccggtcgtcgtcttaccgcagccggactctcctaccagaccgagcgtctcacccttgcgaataccaaaggagacgttatcgaccgcttttacaaccttcttttcaaaaagcttacttcctgcaaccgggaaatactgctgtaagtgttttacttctaccagatacttatcttccatcatgcatcccccttctgtgtcttggaatcctgctgtttatcaaattctttcttctgcatcagccagcatgcactgtaatggacatcagacagatccgtatatggaggcatctctcttaaacagatcttcatgcaggcgcggcatcgcggtgcaaacggacatcccgcaggcggattcagcatatcgacagggcttccctcgataggaaccagcttgttatgctctttttccgtcagcttcggaatactccggatcagcccctttgtgtattcatgggatggacggtagaaaatatcatccgtggtaccgtattctacaaccttaccggcatacataaccgcaattctgtcacacatgttggcaacaacacccaggtcatgtgtaatcatgataatagccatgcccagcttttcttttaaatccatcataagctcaagaatctgcgcctggatggtaacatccagagccgtcgtcggctcatctgcaattaaaagcttcggctcacaggcaagggcgatcgcgatcataacacgctggcgcataccgcctgacagctcgtgaggatactgctttaaacgcttctccggctcattgattccaacgagagtcagaagctccttggccctttcattcgcctgctgtttattcttatccgtatgaagcatgataacctcacggatctgattgccaatggaataaaccgggttcagactggtcatgggatcctggaaaataatggaaatctcatttccacggacttttctcagttccttttccgacattttttcgatctgatggccgttgaattccagagaaccgccgatcagacggcccggatatgcggtgattcccattaagctgtatgcagttacagacttaccggaaccggattcaccaacaatccccagcacttcgccttcttttaaatgaagagacacatcatttaatgcctttacttcacctgcaggagtaaagaaagaaaggcgttcatttttgatatttaccaaatactcgctcattgtatctctcctcctttagtctttgagtttcgggtcaaatgcatcgcgcagaccgtcacccagcaagttaaagcttaaaatgatgatggaaatcgcaagtgcaggtgcaaacaaacggtgcggataggactgcagaccgtttaacgcagcactggcaaggcttcccagagaaggcatcggcgcagcaacaccaaggcccaggaagcttaagaagctctctgtaaagatggaagacggaatctgcagtgttgtagtaacaatcagagtaccaatacagtttgtcaataagtgtttccggatgatacggccgttggaagcacccagtgccctggccgcagtcacgtattcctgttccttcaatatgaggatctggcttcgaacaattcgcgccataccaacccagtacagaagggcaaacaccacgaaaatactgattaagttaacaccgatgacctggatccattcaaatcccggcttttgcgccagcgccttcagcggctggtcaaatgcaaccgacaaaagaacaatgatcagaatgtcagggaccgtgtagatcatatcaacgatacgcatcataatcatatcgacccagccgccaaagaaaccggcaatggagccgtaaagggatccgatcagcaggatgatggcggaagctacaagacctacggtaagggagacccggctgcccatcatgacacggaccgcatagtcacgtcccagattatccgttcccaggacatgcgggaatacgctctctcccgctgcctttgcctccagttccttctctgaatactgcatgggcgccaggttctcgcttccgcgaatctgctgctcatagctgtatggatagaactgcggtaccaggaatgaaaaaatgaatacaaaaatgataactaccaggctgaccatggcaatcttgtttttctttaaacgccgtattccatcctgccagaagccaacgctcttgcggaggacggtaagactctctttttcctcgtcacttgccgggagaaagtcgtctacgttaagctgtaatgataatttattatttgacatcttctttctcctttctatttaagattaatacgcggatcgatgagtttgtaggcaacgtctacgataacgttcatcacaaccatcaatgaggcaaggaatatggtagttcccatgatcagcgggtaatcacgtcctgtgatagagccgataaattcagagcccagacccggaatcgtgaagatcttctcaacgataaagcttcccgttaccgtataggcaagaagcggtcccaaatacgtaactacaggaagaattgcgttacgaagcgcatgcttgaaaatactgattacctgagaaagtccctttgcgcgagctgttctcatgtagtcctgacccatgacatccagcatggaagagcgcatcagacgtgcgatataagatgacggatacagtgccagcgcaattaccggcatgatgtaatttttccacgatgccagtccgtacgtaggcagaagccccagcttcagactcaggacatacatcaggatcgtacagattacgaaactgggaatcgcaattccacacgtactgaatacgattatgatgtcatccacgatcgtccctcgtttaaaggcggcaatacttcccaatggaacgcccaccagaactgccgttaagatagcgatgccgccaactcttgcggacaccggaaatttcgatgcgatgatcatgttcacggtacggcccctctgctttacgctcaggccaagattcccgtgaagaagatctttcatgtatgtaacatactgttcgcctaaaggcttgtcaagaccgtatttctcattcaatgcagcctgtgcctgaggacttatggccttctctgacatgaaagggccgccgggtaccatgttcataacgaaaaatgtaacagatgcaaccgcaaatattgttacaatcgccatgatgatacgtttaaaaatatatttagccattgtgtcaactcctttggtataaggtttccttcgcgcagcccggacggaagcttacaggcttccgcccctgcgttctgcggaatatcaatagtctctcctgccctgatcccgggaaaagggtgaaatgtccgtctaatccagaaacatctgtaggcgttaaacggacactgtctctacagaaaaatcccatggatacccatgggattcccccctgaatcctcttttcttggaaagcccctcgctcgcgcccggcggaatctgataagtccgccttgcccttgctcggtggaatctgttactgcatctgttttgcaacttctgcagcaaaatcctcttcttttttctcaagaccttcgccggtttcaaaccgaacaaacttcttcagttcgatctttccgccaacctctttggaaacctgctctaagtatttagcaacagttaaatcaccatcttttacgtaagcctggtctaacagacagaattcttttaattccttgttcagacggccaatgatcatcttctcgatgattgcatccggcttgtccggattctcgttcttagcctgaacctttaagatctcagtctcatgctcaacgaattcctgcggaatctcgtctctcttcacatactttggtgtcagcgctgcgatctgcattgcaacgttttttaaagcttcttttacttcatcattgacaacttcagcagaagcttccaccagaacgccgattctgccgccgccgtggatatagtcaataacaacaccgtctgttgcaatcttctcaaatcttctgatgttcatattctcgccgatgattgcgatctggctggataattcctgagccactgtcagggaagtatcctttgcccacggctctgccatgaacgcttccatgtcagctgcgctgctggccagtacctgagatgccacatctgcaacatagccctggaactgcgcgttcttagccacgaagtcagtctcgctgtttacttcaacaatcgctgcagactttccatcttcgcttacaagagtctttacgataccttctgctgcgattcttcctgccttcttggatgcagctgcaagtcctttttctcttaaaaattcaacagccttttccatatctccatccgttgccgcaagtgccttcttacaatccatcatgcctgcaccggtcatttctcttaactcttttaccattccagccgtaactgctgccatttgatttccctccatattcttctcgttattcatattatacaggttttcgtttcctggtctacagggaacttcttcctaatctgccgcagcatgcaatgccgtggttcggactccgtctccccataaatcgaaaaatgcttcaacccgcttatcacagccggccgaagcattcatctgcctgaacaattaagcctctacagcctcttcgatatcctgagctgcttctgcttcttcagctgttgcctcgccctggtttgcctcaattactgcgtccgccatcttggatacgatcagcttaacggctctgattgcatcatcattacccggaatcacgaagtcaagctcttccggatcacagttcgtatcagcaatgccgattaacggaatccccagtgtatgagcttcctgaacgcagattctctctttcttaggatctacaacaaagatagcatccggaatcttcttcatttccttgattccgccgaggtttttctccagtttctcccattctttcttgagagcaattacttccttcttaggaagaacatcaaatgttccatcttcggacatggtttcaatctgttttaatcttgcaattctggactggattgtcttgaagtttgtaagcataccgcccagccatctctcatttacatagtacataccgcagcgctctgcttctgtcttgatcgcatcctgagcctgcttcttggttcctacaaaaaggatcttgccgccttcagcagcaatgtcggctacggctttgtaagcctcgtctacttttacaacagacttctgtaagtcgatgatgtagatgccgtttctctctgtgtagatgtatggagccatcttagggttccatcttcttgtctggtgaccgaaatgtacaccagcttctaacagctgtttcattgaaataacgctcatgttattacctccatttggtttttcttccgtctgcttctcttgcttccaaggagaccggaaatccggcaccttcctccagaatccgcaaacgtgattttttgtaagcctagctagtatagcataactttaatccctgtgcaagttattttttacttttaatgacaatttttttcatagtttcgtaaaaaaaagaagcagtttttcttcgccgcttctttttgccaaacagatcatttacgattcttttatctctctgtgagcctgaatccccttgccgtttcctgctttaatcgccttcagttcatcgaataccacatcgtttaagactttgatataagtccccttcataccggaagaacgcgactcaatcactcctgcactctcaaactttctgagcgcattgacaatgaccgaacgggtaattccgacacggtccgcgatcttgctggctaccaggattccctcgtttccgtccagttcatcgaaaatatgagtgatcgcctccagttctgaaaatgacagggtgctgatcgcggattttacgatctgaacctttctcgtctcctcagcgttctcctcattaaccgatctcatcatctcgaggcctacaacggtcgttccgtattcactgaggatgatatcgtcaatatcgtactgggcatctgatttgtagataaacagcgttcccaggcgttctcccgcgatatcaatcggtgtgatgatcgcctggtacttgcggatattgtctcccgtgaatccaagggtttcaaggtttacattctccttggtggaaaggatgccaagcagacgctcattcagcataccgtccacatagccgccgaccgtatctgcaatcagttcctgaatctcttccacatcagggctgatcgcaacgcctaatacctttccttttttgctgatcacgagaatattagaatttaatatctcgctgagcacttcacagatatcgttaaatactactttgtgcgagttgttgttatgcaataacttgttaattttcctagttttgtccaacaattgaacactcataaccgaaaacctccttaagaatttgtaggaaagctcaaaatacccctttaatatttaaatattaacactattccgtcaaaataacaatcattttttgaagattttcgattttcttaataattattctattttgtatttttgcttgtactgtaaccgcattgttcgttggagcaaagcagtttattgcctttttcgaccatataagagccacatttcggacatttctcagtggaaggtctctgccaggacataaaatcgcattccggattggcttcgcatccgtaatagattctgcccttctttgtcttcttaatgaccacgtccttcccgcacttgggacacggaacaccgatcttctccagatacggctttgtattcttacactccgggaatccgggacacgccaggaatttgccgtggggaccgtatttgattaccatgttccggccgcagagttcacagatctcctcggtcacttcatccgcaatggttactgactccagttcgacttccgccttatccactgcttcctttaaatccgggtagaaattgcgtaccacagtcttccacggaacggagccgtctcccactttatcgagaaggtattctaaattagcggtaaaggtgatatcgacgatgctggggaagctctgcttcatcatactgttcacgacttcaccaagctctgtcacataaagatttttattttccttagccacatagcgtctggcaatgatcgtcgtaatcgtcggtgcgtacgtacttggacggccgattccctgttcttccatcgcctttaccagtgacgcctcagtaaaatgtgccggcggctgcgtaaagtgctgactgctgtccagcttttcgagggttaggacgcttcccttctccagccggcccagaagggcgctgctctcttctttctcgtcttcctggatataaactgacatgaatccgtcaaaagccagctttgaagccgctaatgtaaagcagtaatcgcctgccgctaccttaacggatgtcgtctcataaacagccggctgcatacggcttgccgcaaagcgtttccagatcagctgatagagacggaataaatccctctgaagcgattctttgacaatgaccggtgtcagactgatgtctgtgggacggatcgcctcgtgcgcatcctggattttggctccgctcttcttcgcctgttctccgcttgccacgtatttgctgccgtactgcgcctcgataaatgctctcgccgccgtatcagcttcctcagcgattctggtagaatcggtacgcaggtaagtaatgagaccgacagttccgtgtcccttcacctccacgccttcatacagctgctgggccagacgcatcgtcttctgtgtggaaaagttcagtactttggaagcttcctgctgcagcgtactggtcgtaaaggggattggcgccttcttgatccgctctccgttcttcacctcatccacaacgtaatcgcaaccttccagttcctttaagatgccatccagttcttctttattgcggatcgcaatctttccgtctttattgccgtagaacttggctgccagagccttcttgcttcccggctgttttaaatccgcctcaaggttccagtactcttccggaataaaggcgttaatctcctcttcccggtcgcagatcatgcggagtgccaccgactgaacgcggccggcactaaggccccgctttaccttcgcccagagaatcgggctgatcatatatccaaccatacggtccaggattcttctcgtctgctgcgcgtccacaagatccatatcgatctctctcggcgtcttcaaagaagcctttaccgcattttttgtaatctcgttgaagctgattctgtatacctgtttatccttctgctcatccagctttaatgcctttaccagatgccaggaaatcgcctccccctcacggtcagggtccgttgcgagataaatcttatctgcttttttcacttccttgcgaagcttcgcaagaatgtcgcctttgccccggatcgtaatatacttcggttcaaaatcctgttccgggctgattcccagctggctcttaggcaagtctcttacatgaccgtttgacgcatcaacctcgtagctcgttcccaaaaattttttaatcgttttcaccttcgcgggtgactccacaataactaaacaattcgccatacaaaactcctcgcctataatctcttaccataatattgatgggatgtctgaaccacataaccgcccagctccagatccagaagtgtgccgatacattcacttacagacagtccgcttaagatcacaatctcttctaaccccttcggttgcaaatcgaggcaactatacaccattttttcttttttggcaagcccgttctcatttttttcatgaactcttaatattttaccagccttcaaagcgagatattccagcacctcctccggacccaaaagaacgcctgcaccctcagaaatcaaccggttgcagccttcgctcagcgggtcggagacacgtcccggaagagcaaaaatttcttttccctgttccagtccaattccagctgtaattaaagatccgctcttttgtctggcttccatcacaaggagcacatcagagaggccgctgataatccggtttcttatgggaaaattcttctgctgcggcggctcccagggcatccactctgaaaggacgccgccctgacggcacatgcgttcgtagagcccgtaattctctctcggatagcagatcttaatcccgcaccccagcacgccgaatgttcttccgccggccttcagcgcccctctgtggccggcgctgtcaattccataagcgaggccgctgataatctgaactccggccccggccagctccgcagccacagattccgcttcctgtcttccgtaattggtacagtccctggccccaatcacagccgccgcaggccgttcctcatccggaagctcgccccggacaaagaggccaaccggataatcgggaatctgaagcagacgtttgggataattctcatctaagaatgcaaccagccggatgccctccttttccagctgctccagttctctttttcgcttgtccaggctgcacttttccgcatcaaatgcagcagcctccttcggtctgaggagacctgcctgttccagattttttccttctatattatatatctcctcgaagcttttaaactgtttaactatacgcattccggtgaccgcaccgatcccgggcacagataaaaaccagcagagatactgacgctccttatgtgatatcatgatggctgcctccccagtatttttcctccaggccgcgaagccccgctgcttccgccagatgttctttttttatttcgctgctgccggccagatccgcgatggttctggccaccttcagaatttttccatatccgcgcgcactgagtcccatgtgctcaaagatacgttttaaaaacgcctgttccttctgatccagactgcagaatgctctgatctgtgccccgttcattgcactgttaaaatagattccgctgtctttcagccgctgtctctgaataatccttgcagcctcgacccgctcccgtatggcactggagggctctccctcgcctctgcccttcaattcctcatacttcatcggaaccgcttctgcgcagatatcgatcctgtccagcaatggctttgagatcctgctcagatactgcctgatctgcggctccgtacaggtacagcggctccggtcgggatagtagccgcatttgcacggattcatcgctgctacgagcataaaatccgccgggaattcgcaggcgccgtgcagtctggagatcgtaattttccgttcctccagcggctgccttaaaacctctatactgtttttctgaaactcgggtaattcgtccaggaacagaacgcccctggaagccagagaaatctctccgggtttaggaattcttcctccgccggttaacgcctgcggactgatcgtgtggtgcggactccgaaacggccgtctggacagcagcggctgttcctgaggaagaagtccgcagatactgtatatcttcgatatctcgatattctcctcgtgagacagcgacggcatgatggttggaatgcgtctggccatcatggttttccctgtgccggccgatccaatatagagtatgttgtgcataccggccaccgcaatctctgtggcacgtttcaggaggaactgtccattcacctctgagaaatccacgtcataggattctgtttcggaaaggcagtgactatcccgtcttggggccggagacagccggtccgggtcatttaacactgccgccagttctttgatgttctctacgccaatgatgtcgatgttctcaatgatctgcccctccttcacattgggaatcgggagaaaacaccgtttcattcccgcgctgcctgccgccgccgcaatcggcagggcaccggagaccggcttgattcttccatccagtcctaattctcccaccagcacactggtgcccagaagcgactgatccaccagtcctgttgccgccagaaccgcgactgcaatgggaaggtcaaatccggtcccttctttcctcacatctgccggcgacagattgaccgtaatttttcttgccggaagccggaaaccggaattcttaagtgcagtgcggactctgtcctgcgcctctctgactgctcctgagagataaccgaccatggtaaaaccggggagtccttcgctcacatccgcctccaccacgacgggatacccttcgactcccaaaataccgatactgtgtactttgctgaacacactttctcccttcctgtttttcattctgagttggaaatatgatgcagaagtgcatcgattcgtagaatgttcctgatgtggaacctgcatctatcatacaggatttttacttgtctggcaagcagtttttcaaccgcctgccagtctgctgctccctatgaaagctcatggtatgtaatccagcttaagatatcgtgccagacgttttctttatccgtctcattcaggatctcatggcggtcatccgggtaaagaatcatctctgcatcggtcataccgatcttcttatacctgcaaaacacccgtctgacgcctcttccgaattcgcccaccggatcctgtgctcctgacagaataaagagcggcagggatctcggaatccggtcttcctggcggtgcagtttcaaatccagcataatattgaaaaaatcacagtatgccgaggcggtgaatttaaaattacagagcgggtcactgcagtactggtctacagactcacagttcctggagagccagtcgttgtccgtcctggccggcataaaggagcggttataattccccaacaccagctggtgcatccatttgctctggtaatcgtttccccggatcagtccgatggtgcccgcaatcagttttcctgcaatcacgatcggcagagcctggtctcccgtaccgatcagaatcgctcctgccagtccgctcccgtacagggtcagatatcttctcaggaaaaaggatcccatgctgtgtcccagcatatacagcgggcgccccggatacatgacccggatgcggctggctgtcctgtgtaaatccctgatcacgcagatatgcccgccgtggtcggagaagtaaccgtaccgtccgtcctgaacagttccgccatgaccgagatggtcatgtccaatcaccgcaattccctgctctgccaggaaagcagcgaaggcatcataccgaaggatgtgttccgtcatcccgtgtgaaatcagaagaagctgtttcacctctccatccggttcccacaaaacggtatgcagttctgatttaccgtcgctggaaggaattctgaactctctccgtcttatcatacaagcaactcctctctgtcacatttacaaaataattctgtcacgctataagtgaagtataccataaactctgcagccgcgaaaggctttatcctgatctttcggctttcagtcacctccggtcctttaagccatggtcaaattccggcatataagcccggtaccgcagcggcatatggtttcgctggcacaccggattccaccgctcttttatggtaatgctccgccttaacgccttccacagttcccggtatccgtcttcttcggcggccttgtgaagcctttcctcccactccctggagtccagctccatgagaaaccacggctgtccggcctggtgaagaacggcttttttccggttctcgtcgtagataatccaattctccgccggcatacggtcagcaaaatgaggagcgattaacaccagcacatcattcttcggcccaatccggctgaccaggatgtcctcatccatctggacaaaacgcagaaactccgtctctaaatgtgcttcgttatcgagattccggcatatctcaaaaatctgaaacacctcaggcagctggagactctgcgtcaccccagctcccatctggaatcctctgatcaggaaacggtagatatgatccgccttatctccatttttgctcagggaggccttgtagatggcctcatacgccgcttccgatattctggtgcgcacggaacggattactttttccactttttcatcgtcgggcaggacatcgatatattcgcaaaacaattccatcgtgcggttctgtcctgcagtttccagccttacactggaatggcctttcctgctcatccacgcatcatacacgccggtcagaattccttcaaaactgtctgtacatatataaaccgtcatatcacatactccccgtcacaactgaataccggtccgcaggagccggtgaaagattaagcttcatatcatcgaacagcgacagctgacggtaggctccctgatggctgatatcccataccgcacgccgttcatctccaactaaatggctggtgatatagtcttcatccatccggatcggtgccaacatccttcctgaacatgtaataaaatacatggctctcttcagcaccacccccatcttcttcaaggcatcgaaatccagcgccccctgtcttctggctgcaataattctttttacggacttcacgcccattccgggaacccgcagaagcgtatagtaatcggcccggttgatctccaccggaaactgctccagatggcggagcgcccagtcgcacttggggtccagaaatacattgaaattcggccggtcctccgtcaggagctccgatgccttaaaaccataaaaacgcagaagccagtccgcctgatagagccgatgctcccggagaagcggcggcccgcccggaagagccggaaggctggagtcctgattgacaggaacgaatgcggaataaaatacccgtttcaaatcgtagttctgatacagcgcctccgccaccatcatcatctgataatcattttccggcgtcgcacccacaatcatctgtgtgctctgcccggcaggcacaaaagacggtgtccttttatattccatcagttcatacttattcgcagtaataccccgctgaatctgcctcatgggagccagtattttgcttctgctctttcccggggccagcttttttaagccatccgccgtcggcagttccaggttaatgctcatacggtccgccaggaatcccaccttttcgatcaaaaccggatcggcgcccggaatggcctttacatggatgtagccgttaaagcggcagacctctctcagcctcttcagtgtctgatagatcagatccatcgtataatctgcgctgtataagattccggagctcaaaaacagcccctcaatgtaattacgtctgtaaaattccatggtaagagtacagacctcatccggtgtaaatgaggttctcaccacgtcgttggaacaacggttaatgcagtacttgcagtcataaatacactggttggtaaaaagaattttcagaagagaaatgcatcttccgtctcccgcaaagctgtgacagagccctgctgcaaccgtattgcccagcattcccgcctctccctttcggtcaacaccgctggaggtacaggccacatcgtatttggccgcgtcggacaggatctccagtttttcctgtatacttaaatcttcctgaatcagcataaaccacctcgaacacatgttctttttctttattttagcatattcagaaaaacttatcaagttatttttcaaacatatgttcgatttaaaaaagacggccttttcagcgctttcattccagcgctgaaaaaaaccgtccataccgtcgccgcggcactctgttcttttatcttactttgcatacccttccggattattcttctgccagttccaggaatcacggcacatatcctttaaatcacgctgcgccttccagcccagttcacgttcggccttcgccggatctgcatagcactgaggcacatcgccggccctccttggcttgaactcatatggaacctttaagccattagcctcttcaaaggcatgaatgacgtcgagaacgctgtatccgcagccagttcccaggttataaatcaaaacgccgcctttttcaccttccagcttcttaagcgccttgacatggccatccgccagatctgctacgtgaatataatctctgacacacgtcccgtccggggtatcgtaatcatttccgaaaactccgagggattccagcttgccgacggcaacctgggtaatatacggaagcagattgttggggattcccttgggattctcaccgattctgcccgattcatgtgctccgatcggattaaaatagcgcagaagcatcacattccactccggatcagccgtatgtaaatcggtcaggatctgctccagcattccctttgtccggccgtagggattggtaatttctcccttcgggcactcttctgtaatcggaacaaatgccggatctccgtatacagtcgcagaggaactgaatacaatgcttttcacaccatgttcacgcatgacatcgcagagcacaagtgtaccggtaatattgttgtgatagtattccagcggtttgtaaacagattcgcccaccgccttaaggcctgcaaaatgaatcaccgcatcgatcttctgttctttaaaaatgcggcttaaagctgccttatccagcagatcagcctcatagaaagcaagcgtctttcccgtaatctcctgtacacgctccatggattcctcgcaggaattacagagattatccactacgaccacctcatagcccgcctttaagagttctacgcaggtatggcttccgatatatccggcaccgccagtaactaaaattgccattgtcatgtcctccttctaaaattgtctacggatattatagcagtctgaacggaaataacaatgcagatttctttgaaaaacctatatattttttcaattttgtttttgcaaacgtgtgcagtcctgttccggaagatacttttcttccgatactgccggtcttatggctcgaaaacgcggtctccttccagaatatcattgcagatgtatccctctgtctccatatattggactgtgtagggatagtcatctcccgtcctgtttaccagataaaacaggacagtcggaggggaggtgatctctggtctcccgttttcccacacccccgcaatctttacatgggtttcatcaatgcgctccggctccgaaaaagtaaagctcccttccattgcttcagacaggtgaaacaccaccgtatcattcttttcatcaggcgttataaatccggacatggattccggtatggcaggcaaagaggtatttccttcaaaaaggacggacagatacgtcttcagtttctccgtcttgatggaaatctccgtttctccctcctctgctccggcagctgcaatgccgtagaggcaccaccatgcaaaggaattgtcggcggtattataaaccatccgtttctcagacgcagtccataccatcccccgtaatacggtttcctgcagtttcagagcgtcctgcggcgtcccgttctgtttatccgcggtttcaccggcagtctccgcagattcttcctgcctgtctttttccggcaggcctgcttctgtctgcccggcggctgtctcattttgactgcgttccgcaaaagcctgattcgactgttcctctgcttttccattctcctgtcccgtatattttgaggcacagccgcctgatgcaagcgcacacacgagagccgcggtcaaaagccatcttctcattcttttcccctctcctattcccagtctttccatatctccggatggtatcccacggtcgccttttttccgtttcgaacgaccggtgtttttataacctggggattcaggagaatcttctcttcccggtcctccggagacagatactttaagagagcaagcagatctttgtccctgcagttttcatcgatcagggcttccacacctccaaccgcctgtttcacattggtaaattctcctttgctcatgcctttttcggccatgtcaatcatctgtacgcgaatgttccgttctttgaaataccgttctgccttcttcgtatcgaaacacttctttttgccaaatatctgtatgttcatctgtcaagcctccaccacaaattttcttttttatcctatgagaaaaacagcgagtaaatatcctaatgtcaggcagagcccgatacagaacagcatcaggccaaaggaaaagctctcctctaccagctttccggtccgcttcagttcttcctcggcctctataaaacgcggaatcgcagatgtacggtccgccttttcttttctcccccatctgcgtttccatgccgccgcctcatccgccatgcttcccagcacacaggcaagtctgtcattttctcttattttcccggttcccggaagctggcggtgggttgtctttctcgcaagcagaatcagtccgtcaacgagtgaatccattgcccggcagaccacggaggacaccgccagaaacacagtcaccgccgcggagaccagataccggtcgataaacccgcagaccgagccgcagattccgggtaaaatccgcagaagaagcggccggtaaagcagattctccaggtccagccaggaaggcaggcggtctgcgtaaaccgcttcccctccgtcagaccgtttcatcagaagcccgcgtacaacggtgacatagaaaacaatgccgattccgatggaaatggctcctcccttaagattttccggagaaaaataagccacggagtgagccagcccgtctccccggaaaaacgcttcacctgctcccgcgatccggtccatggtaagatgcggcgtcatacccagcagcggaatcagtgccgaacagccaaccagcacaaaacggctgagaggcttcatataggatgcggacatcgcgtcatacgcctcctgattggccggatgcttttccacaaagagggcgataaacagtttcagcatatacgccacagtcattccccccgtcagaaggaacacccattccgccgccttccagacacccggattcagcaggagcgctgtgatgatgccgggcattccggcaaaggcagacggcattccctgatttcccaaaaccacagccccctctcccacagccttcgcatactccaccatgctctcatgcagaagcgttttgctcacataaccgctccacagcgggattccgccgattcccaggcttcccatgaggaaacagaaccccagcgcaggcttccttctgccgaagccgcgaatctcattcaaatccagcttatgcagattcatatataccgccccggcacagagaaagagcactaatttgaacagcgaatggttgaccatatgaagtaacgtgccccgcaccgcgagaccattttcctctcccacacaggcaagaagaaccgccatgccgattcccgtaagaatgaaaccgatctgggaaatggatgagcacgccagcgttcttttcaaattcacggacagcagcgccagaagcgccccaagaaacatggtcacaagccccagtgcagtgaggagaagcccccagtttccatcagaaaagaatagcactccggtaatcacaatgattccgaatactcctgctttcgtcagaattccggacaagagcgcactggccggagcaggcgccaccggatgggccttgggaagccagatatggaggggaaagcagcctgccttggctccaaagccaaatagcagcagtcctcccgcagcatagagctgtacggcaggcgaaaggtaaccgcctccggcctccagagcctctctcgccgccggtccgagcagatccatgttaagcgttcctgtcagatcatagagcaggaaaaggcccatcagcatggcaaggcctccgatcacagccactgccagataggtttccgccgcccttaggctctccttcttttcgtcgaacgccacccagacgtaggaggtaaaggacataatttcaaagaaaataaaggttgtatacaaatctgcggacagaaatactcctgctgtggcaaaaaatgtaatccataaaaacacatagtatctccgccgtttctcataatgagccatgtattccagggaaaatgcaccgctgaccgcccacatcagtatggcgatgcaggaatagatcagacgaaagccgtccagcttaaaatgaaggcccagtccgcagattccggggatcacaacatcaaacacggtcttcatccagcctcacctccgatcgctgtaagtaattccatgagcggcccggaatgcaggcccagcaccagcaccgcggccgcaaagaccaggagcggcaccatcatcatccagttgggatcggtatatgcctcttcttttaccgcggcagccgcatccgctttgggaaaatacgcccgcaccagtaccgtaagcatatagattcctgtcataagagccgaataaagaatcacagccgtacccagatacggaagaatccccatcctgctgccgcctgccagcgcgagactgccgcaggcaaaggccgcctccgcaatgttccatttgctgataaatccggcaaacagcgggatgcccatgagagaaaggctggccaccgtcagacagccgaatgtcagcggcatcttcttcgccagaccgtccagttcacagacatacgtctttccggtctgatgcatcaccgcgcccgcacagaaaaaggaacagatcttcatgaatgcgtgaaagaccatgtggcttaaggcggccgccagaccaagcggactcatcatggaggcgcccagaagaatatacgacaggttgctgatcgtggaatacgccaggcggcgtttccagtgaatctccttcaccgccatggtggaaccgaagataatcgtcaccatggccgccgccatcaccacccactgggccgcgcttccacgcagaaactccgtaccatagctgaaataggtaaaccgcagaatggcgaaggcgcctgatttgactacagctaccgcatgcaggagggccgtcaccggcgtgggagccacagtggccttcggaagccagccgtggcatggaaataccgctgcttttactccgaacccgaagaatgcaagaatatagacaaacagcagcatgccccggtttccttcggccgctgccatggacaggacgccgcccggaacaaactccgtagttcccgtggccgagtattggatcacaaaaatcaggccgatgaaggcgaaggccgcgcctccaatggagtaatagaggtatttgcggctcgcccgcatggcctcctttgtcatcggatgaagcaccagcgggaaggtcaccagcgtcagcagttcataaaacagatacatggtgaccaggttgcctgagaatgcaatccctgcagtcaccccatacgtcatcaggtaataggcaaaaaaggagacccttctcttctcatgcctcatatattcaaatgaataaagcgttgccagaggccacagaaacgccacaagccctgcaaagaccgatcccatgcggtccagcttaaaccggaccgtcagattcccgtagagtttaaaaagcaccagtccgtgatccagaccgcttcttccggcgatcaccacggcaatcagaaggctgttgagaagcaccagcccttccacaacgaattccagacatctgtatgttctttcatcctccgccccatatccggaggcgaggatcgccattcctgccgcgatcggaaggagtgccggcactgccagtaaaattccgttcatacgtattcctccgtcaaagtacggtcgctgcaatggattccagcatagccaggaaccggcccgggaaacagccaaagagcagggcacccgccgtaaagatcagtatcggcaccatcatacagagcgaaggttcctgcccaatcagccctctggcctttaacccgctctcatcgaagtcctcccccggaaagaaaccatggatggtaagaggaagcagataaccggcagtcagaagcgcactgaccagcaggacagccgggcctgcgatcgtccacacccccgtttgggaggccagggcgccgcacgccagataccatttgctcacaaacccgctgcagggtggtattccaatcagagccagggacagaaccgtgtagccgcccagcatcaccggcatcacccgcccaagtccgcgcatctcttccaccctggtccagccggttttaaatatgatggcgccggccgccagaaagagcccgttcttgatcatggaatggaataccacatgagataaggcccccacaaagcccatcggttccagaagacttaatccgaacaggatgtaggacacctggctgaccgtcgaatacgccagacgtttctttaagaccggctccctgtaagccagcatggagcccataaacacagtgagcagggacagcagaatccacatggtctgcacccaggttccgcgcagaagttccgggccaatcacgtaataaacgacccggattacagccagcacgcccgatttcgtgatcaggcctgacagaaccgcgctggccggcgccggagcgaccggatgggctgtgggcagccagccgtgcatgggaaacataccggccttcgttccaaagcccagcagcatacagcatgccgcggccagcaggattccttcctttccggcaagggatacgccttccagcacgccgcccggagtaaacgtcagagtgccggagacgctggccagaaagaggataccgaataacgcaagaaatgcgcccgccacagagtaaaataagtacttaaggcccgccatcaccgcctccttcgtgagttcgtggagaacgaggggaagcgaagtcagggtcatcagttcataaaagacgtacatggtcaccagattggcggaaaaatccagaccgatcagcactccgagaacgatcagataaaacccgaagaaccggtgttcatcccgttcatgggtcatataggtcatggagtagatccctaccagaagccagactgacgccgtcagcacggcaaaaagcctgctgatcccatccacccggaattcaatggtaatggtatccgtcagtttccagagcgtaagcccgcctccccgtgccactgccgcaaacgcacacagcgcgcctgctgtcagcgccgccataaccaggctgatcatcgtcttccggctgtttctgagccgcttcaccgtcagaagcagcactcccgccgcaatgggaatgagaaccggaagcagcaatactatagtttcatccatctcttggtacataagcttctccttgttatgagcactctgcaggtagctcttattcaaacatcaaaagtccgtcagcgatcgcctgtacaatcggctgcgatttcagtcccagaaccagattcagaaagatgaagcacacaacagccagtctgagtttccaggaacttttcctgactgcggaccgttctttggctcctctggtctcccggtccccctctctggagtacagggtaatgacgaggcgcagaaaatagatggcgtttagcgtcgtactgaccgccaggccaatcagtgtaacgatcattttattcgggctctggagtgcggacgtggcaaacagcagcttggatataaatccggccagcatgggaaacccgaccatggaaagtgcgcctacggaaaatccgattccggccagcggattccggtaccccgccccccgcaggctcttgtagtcctttttatcacccgacacctcatagaggcccaccgcactgataaacagcagcgcctttgtcgctgaatgggtaaacatgtggaacacggcagccaccatcccggcttccgttccaaggccgattcccatatagatataaccgatctgagccacggaggaataggcgatcatccgcctcgtatccttttccagaatcgcgtggagggatcccatgagcatccccgccagtccgaagacaaacagcacgttgacaatccggctggctaccacgttctctcttccaagcacgcggtagaaaatctttatcagcaggaaaatatatcctttcgacacaagcccggataaaacagcgctggctgtcggagtcgcatagccgtaagtatcgggaatccagtaatgaaacggatacaggccgctcttgattgccagtccgacactgatcaccgccagtatcaccagcatggggatctcgtaactgcccgcagcttcaatggcagccactgccgccttagccgggctcatcagcaggtgtcccgtcacatcgtaaagcatgctgagcccgatcaaaaacaggccggaccccagctggctcataatcatataccggattgccgccgacaggctcctgcccttctgccgaatcatgatcagcccgcagcctgcgatggtattgatctctacaaacacgtaagcggtaaacaggtcattcgtatagatgagggccagaagcgagctgagcatcaggtcaatcatcacgtagaacaggtttaactttgtcccttccacatccgccgcggtatgatccatgcctcccagcaccgacagcagcataacgataccgaatacggcggcagtcagcccttccagaatgccggccctgatctcatttccccagggtgccggaaaatggcccatcatataagtatagctctctcccgtcctcatacagaaccaaaaaacggcggccgacatggctgtcgtgaccacaatcactgccaggcttacattcctggcccgttttccagagagcgtacacgatatgataccggaaaacatggcgataataatggaaaagaaggggaagttctgaacaagggtcatgtcttttcctcctccttcgcctgtatcagaatcgcatccaaatccagggagccgtatcgctcgtacaggcggatcgtcagcgccagcattaacgccgtcgtgctgacagatactacgattcccgttagcacaaggccgctgggcactggattaatataagccgaggcctccttaatcccgttcatctcgatgggaacggctcttccctgaatgtaaccctttgccgccaggaataagtagaccgccgtgtccatgatgttcattcccataatcttcttgattaaatttttatggagtaaaagcatggtaaatcccactccaaacaggatgactgccgcggtctcttccatattggaaagcaggtgtgccgccatatcacatccctccttttcgaaacagagtgtaaaatgcgtacatggtacaggccactaccagtcccacgcagatattgagaggcagaatcaggccgctgcttaagatggcgccgggcgttccaagggggattccactctccagatggttcgcgccggtaaagaaggaatagcttttcgccacacagtaaaacgtcagggcgcagagcgtgattctgtggtacaccttttctgtaaaaaagcgctccgtcttccggaagccaaaggcattcaaatagaggatcaggcctgatcccagaaccgcccctccggaaaacccgcctccaggcgagagatggccgtttaaaatgatgtagacgccgaaaatcatgataaaaggaaccaggatacaggcgcatttctgcaaaatgatgtcgttcttcggctcaaaaagccggtcattggcctcgtcaagccgtttgcgcgtctgctcgtcacggctcaccgcatcgatccgaagcagtgccagaacgcagcaggaagcgataaacaggacgcacgactccccaaaggtgtcgaaggcgcggtaatccagaatcataccggtgacgtagttaagcgcaccggtctcctccactcctttttctatataccgggcggacacctcgttgttgtccggattccccgcatttccaaagaccggcagataggcgatcgtccagagaagcacaaagatgatggtcaggcagagaaggactgacatcacctgataaaaccggcgaaacagaagaagtccccgttcctccttcctgcgcattctggcggccttttccgggtcagactgcaaaagctccgcctgtgcagtctgcgccgcctgcgaaagttcctttaactcttcttccggagcgcgggtctccattccgtctgcgagaaggtccgtctcgccgtcgacccatttcctgaatttcagccaaaggctgttttcataatgatccttcgtcctgctcatcgcgttcctcctttcggatggctctgatcttctttaacgtaatgaaaaagaggatgctggtcacacccgctcctaccgcagcctcggtaatggccaggtcgggcgactgaagcaggatccatatgatacacataatcaggctgtaggacataaaaataacgatggaggtcagcaaatccttcgtaaatgccaccgatacggcgcatacgatcagacagattaaaagaatgatttcaaagagtttcatcgcccttttcctcccccttctgttttttatcggttttctctttccgtatgacgagaatctcacccagctcctcatcggtcatggcttccagacggctgatcatatggccggacaccggtcccgcagtccagaaaaaaagaataaccagcagtaatttgaaagagtccatggaaaatccccggatcaggatgaggcctgcaaacacaaacagaattcccagcgtatcccccatggccgccgcgtgcatcctgtttaacgcccggtgaaaccggttaactccaaataccgccagcatcataaaaacaaggcccgtcacgagacaggcggccgaaagtgcgaatctgatccactgccacgtcatagcaagtcctcctgttctgtattattccctgtctctccttctctccccgtttcttccgcctgccgctctacgttatcctcaatcgcacccaaatcggctttccggttcttcttctgaaggtagacgcccgtgtataccttgcacaggacgacgacccccagaaagctgatcatggcatagatcagactgacatccaccagatagttctcatccagataaacggaaagtatggcgatgaccatgatcaccatggttcccgtcatattgactgcaataatgcggtccgaaatcttcggtcccagaacggaacgaatgatgctgatgatcattaagactgccagaatcagggcggccccggttaaaagcatctcataagcctgtcctatcttgtccatctcgcttccacgtcctccatttcctcaagcagctttacgaataccgaatcctccatcccttcggccagttccttatccagacagtgaacacagaacctgtcgtcctccacggatacggtgatggtccccggcgtcagcgtgatggaattggccagcagcaccttcgccagccccgtctgaaaggccgtatcaaaatacacaaaggcaggctccggctgaagctccggagacaggataatcttcagcacacatacgttggccttcacgatctcctttacgagaactccgaaataacggataaacagcgggaccagacggaacagcagcagctcttttttcaggctgtattccatataccggcacataaaataaaaaagtgcggccgaaatcaaaacgccaaagatacagatttccgccgtcactttaccgttcaaaatcacccacactgcaaaaaataaaagaaacacaggcatatcccccttccgcccagtttgatttactatgtattatacctctcattggggggaaatacaagggaagttacgcgggtaacgccgctgtcctccggatgctgcaggacgccccctgtttttgaagctttctggttgtatcatttttccgattgcgatataataagcatgtaacaagaggccaatgaggaatgtatatggatttaattaaccagtttattgaaaattataagaaaaagctgaacttttacgagatggccggccacatcgcggccaggcagctggaatccgcccttcaggcggccggtatccgtgccatggtgacttccagggccaagaatcctgtcagattaaaaagcaaggtacagagaaggaacagccggcggacggttccttataaaaatatgagggagatttacgaggatattgcggatttatcaggcgtccgggtgtctctctacttccccggagaccgcgacaaggccaacagcctgatcgctgatttatttaccatcattgagacgaagcaattcccggaacagtcgaagccacctacctacaacaaacgattttccggctactgggccaaccattaccgcgcccatatgaaggaggaatccttagacaagacgcagcaaaaatacgccaccgcgcgaatcgagattcaggtggcgtctgttttgatgcatgcatggtctgaggtcgaacatgatcttgtttacaagccgctttcaggaaccctgtcggaagaagaactggctatcatcgatgaactgaacgggctggtcctcgccggtgaaatcgccctggaacggctgcagagtgccggcaacgaacgggtgcggagcaaaaacgccacgttcggcagccagtatgagctggcctcctacctttacaattacttaagcaataactttcgccgtgaggacatcgaactgcgcatgggaaatatcgagttattatttaagctcctgagcagactcaagatgaacggcgtcaaagagatcgagccggtcttaaagtcagtcaagttcgaaaaggaccgccgcaacatctcccagcagatcatcgaccagatcatcacgggcaacgaaaagcggtatcagatttaccgggaactgcgcattgccggagagaccgatgaggtggccagcaacgccatcacctacttctttaaccagtgggtgcctctggagcatttcctgaaccgcatctcacacaaaagttcgcctaagacccgcggggcctttaatatcaacaccttaaagcgcctggacattctcgacaaggaatgcctcaataagatcgtcgctctccgtaagacaaggaatgtcctcatccataacattgagactcccgaggtggacgacttactggagcagggaaatgaagcaagggatttactcgtaaagctggcggagcagttctccgctcccgccgctgccgccgaatctgcgaaacagacaaactgactacttcgaaaaaatatagtttgcagcatagaacagcagaaatgtgtgcgccggataaaaaacatagaaaaagtattttaatcccggacccttctggttgttatagctgagcatgaaaggcagggccagaaccatcagccactgcgtcgcggtacctgcggccagcatttcctcgctgaactggcagatgcagaagatcagatacacggctgtaaatacgtctttttgctctttcaggaaatacatcagtacacccagcgcaacaaattcaagtccgtattcattcatcgccagattgggaatcacaccggtgagcgtatctccgctcaggctgcggaggaagggaaagaaacggggcagcatataatataagatctgcacgagaactatgacgccgatcaggatgccgcccttttttctgtcctttataaacagttcgatggtactgatcaggacgcccaccagaaacatggacagaaaaatgttatggtaaccgtaatccacaaccgcattgaaccggatttttataaagtacataaagccagtcataaaaatgctcatcaggtataaacgaagcaggtatttcttccggttcctcgtgtaatggtatccccataccatactgaatagaaacagtggataggaagctctccccagccaccggaaccacaccggtgctccttcaaaatagagtccggtatgatcaagaaacatcaagatcaaagctgtgattttcagtgcaaatgtactcatgattcccctccgtatcttgtattattgttttatcctgctgatgcagatcagcatcaggtaaatattaccatataatacttggaattcacgaaatgattccttaagaaaaccggatggaaaaacactttttatcggagacagcctttgtataataaatctagataaaaagcggctgtgaaaaagttgatttgactccactttttcacagccgcctcttcttatttctttttactcaaatcattctccccagaccagaatccggttcataccttccttcagtccttccattggccctgccgcaggctgtccgcttctcgcctgaccgagataatcggtatcaaatacgatcggggttccatccggattctcatatggagcctccgtgatgcgcggcattcccagcttttcggtaccatagacctctgtcggaatctccagcatccctttttccacattcagctccagatatgtcttcccgtcttcctccacaatccgcacagcaggatccgtatcgcttacatacgtgttttcttcccgctcataaggcttcgcaccctttaaataagcgtttccgcggatatataccggctgttttacatgcttgaactgctctaaatcaccgtttccgcaggaaactacatcgttaatatattcctccagagaattcgtatggccgttatagccttcggtaccatggacagactgttcagtataggtcacagttcctcccaggaatatattctggaagatacggtcgtcgccgctgtacaccaccgtggttcccgccacttctgtcgtatgagggaagtgatatggagtggaacggtccagaacatcctctctcctcatggtaccgcagcagagattgtgaaggtaggcgccgccctgggcgatattgtcgaaattataactggaggcgaatatattattgtccaccagatacgggccatgggttacttccaccatgaggtcacggtcattggcatagtataaattcttgctcactctcgttccctgggcctgccagtccagccacgttcccagcgtacagttatgtatgttgttgtgatgaatctgtacgtcgatggctgcatgcagcttgattccaccgatctcatatccgaaatattcatgttttaccgcgatattataaatatggttatgggcaatctcgctgaatacacagcccatatggcccacgataccattctgtccgcagtcataaatctcattgttccgaatcacatgggaaccgattgtctccttgctccatccgatctgtcttgcacggaatacggcttccatctgatactggtatcccggttttctgtgggttctggtacagagattatggccggttgatgcttcctttccgatgctgattccactgcacctggcatcgtgaatccggttgttttcaatgatccatcccttactccagtttgttcccaaaaggcccggctgatccgcagtcggaggagtccacgggcatgccgcctgtgccatctcaaacccccgcaccgtgatgtaattgattcctgttttctcaggatagaagcagcacttgcgcacattgatctccgtcagctcttcgtttggattcgctccctggaagtttgcatagatcacggtagtatcccggtccgtctctgcataccactgaaagacggtgtcctccggatgcagaattgcttccggatgtttcatccacggtggatttacgccttccgtgcgaatgaccggattcttcacttcatccaggctcttcgcctcataaaaggatttcccatttaaatagacgtcaccggtatgcagggaattgtcagccggatagatgaaccagtcccctcccagaacctcctgatatggattataggttccaaagaaagaattagggagtactgctttccagacactgccctctacaggctcccagcttgtgatccgctctgagcctttaatcaccacccgctctccttcagctgcctcatatgtaatccttgaaacgctgccggtacctccctgcgccggtttcacccactcgcggtattctccctcatggacaatgacacggtcccccggcatagcgagagacgcggctctcgatattgttcggaacggctggtcttttgttccggaattagagtcacagccggttaccgccacatgatattctctcattttattacctcctgaaaattgtatacttatgatgacttaaatatagcagattgtgtcagttttgactttacaattattgcgccgtctatatcaataattgcttcattaaagcgacacatttcatgataaccgctgtatttatgagtatttatattgcaaattcaccataactacagtatgatagcaggaaatacagcgcactttttttgtttcacttttttattttatcttttccctggcttcaggcctgctgtaagaaagtcatgaaaggagcttcccgatgatcgaacatcttgacggtatttttgagacagttacattccgcgaaaacatgcagattcgaatcagcgatatggacatctgtgaagatttcccggaccactggcacactccgatggagatcatacacgcaacgaaaaactggtataagatcgtggttgacggccggacctaccggttaaacgagggagaaatcgccattatccgccccggcaccatccacgccctccatgcgccggacactggcagccgaaccatctatctggcagatttatcattcttaggaggcatttccaacttagaaacactgctcgccttattgccgccggtgaccaccattactccggagagagagccggaattatacagaaaagccggcgaactcctctccttcatggaagaggaatacgccggctcccggtccttttacgatatgctgctctacggtgcgctcatcgagctgttagggctcctgggaagatacgccatctccccttctgtttccgccaatacgcttggccctcagtctgccaaatatgccgaacggtttctttacgtctgcaactacatcaacgagcactgcacggaggatttatccctggaaaccatcgccggaatcgcgggcttcagtaaataccattttacccggctgtttaaagatttcacccatacgtctttttaccgctacttaaacaaaaagcggatttcacacgcagaacagctcttaatcaacccggaatactccgtaaccgaggtagcgctccagtccggattttccagtctttcagccttcatccgcatgtttaaacagcttaaaggatgtactcccacagagtttaagcggatgtattcgctggactgtatgaaccgtgtagacggagattctgcgccggatacactgtcaggaaaataacgctttcgtctgttccatccgttccaccacaggtacgccgaagggacaccgtgattcgcagcttccgcagccgatacagtcacccgcccccgctgacagtccgttataatgcgcccgcagcgaggcagggacctcctcctgcatcactgccagatcgtaaagcttgttcaccatagcgatatcaatggccgacggacacggcgcacagtggccgcagtacgtacactggccggcgtacgcgtggtgaggtgctcctgcaagtacggtcgcgtaatctttttcttcctcagaggcatattcatacgccacagcggccgccacgtgttccggagtgtcataccccaccataacactggcgactgcaggcctggtgagggcgtagtgcaggcactggaccggtgtcagtgctgtgccaaagggggaggcttctgctgaaaacagtctgccgcctgcatatcccttcataacggtaatcccaacctcttcccgttcgcagatccggtacaactctgccctctccggcgcaatgccgcccagcgcttcttcatactcctctttaaaatagtcatccatattctcgctggcaggaagcatatcaaatgcagggttgatgctgaagagaatcatctcaatctcaccgcacagagccgccattttcgccaccgccggattatgagtgctcataccgatatggcggataatcccccgatccttcagttccctgacatattccataaattctccatggatgatcgactgaaactccgcagcctcatccacaaaatgaatcattcccagatcgatataatctgtacgcatgcggtccagcagatcctgaaacgccggttttaccttatctaagtcgcgggttctgacgtactgcccatcctgccaggtagagccgatatggccctgaataatccacttctcccgtctgcctgccagtgcagccccgatgttggaacggacgttgggctcagacatccagcagtccagaatattgatccctgcctcctcgcagcagtctatgacggctttaacctcatctgtattatggcgttccagccattctcctcccagtccgatttcactgaccatcaatccggtttttcccagttttctgtagttcatatgtattccccctcctttattcccgtactacgggattgtagtccagcctggatacaggcctgcagtcccgaaactccgtactccttcgccagttcctcatccagtgtcgtctttaatacagtaatcttacatttcctcatatgggattcctccaatactgattcacagcaagtgctgcggccatatcttatacagatccgtgatttgatttcatggcggtaaagcttgatttttctaactgtaatgtatataattacagttgtagccgctgtatatatatcttttattctatacgaattgcggttggctttcaaccactttcgagaatgcggaggactgatatgattgaagaaggaactgtagtttattacctcgatgaagatctggttcactctgggcgggtgaccgatgtgacccctgtcagcggtggatttacattcagcattgacagctacggagcctgtgaagggccgtatgtgatcgcttccgggcagatcggcaagaccgtgtttttcacggaaaaagaggcaaaagacaggctgggactataagttcccggcttgttttgttttattggtatctgcgtatcctggcagatacgcgcgcaatgttgacgcctgtaaacatatatggtattataatattaacaattgttaacattatgttattgtgtgttaatattgattccactcatctttatccaaccagaactgacttaagaaaggccggactatgaaagaagacagaccatatcatcacggaaatctgcagacagaattgatcgaggaggggctggcgctgatacacgaggaaggaaaaagtaatttttcactgcgcaagcttgcgaaaagactgggcgtctctcctgccgcctgctataaccactactctacggtcgatgaactgatgcgggagatgaaaaattacgtcactcaaaaattctgcggggctctgatcgcaggcacggataaggatgatcctgccaatgccgttctggacatggggatcgcctatgttaatttcttcgcggttaatccccactattttacatttatctatgacggtgacgattacagaattgatttgacggaagatacgtttgacggagactttgaaccctttcatctgtttaaggaattagggctgttgtgccttgagtataatcatgtggagaaggataaacgccgcgacagcttaatcatcatgtgggccgccgctcacggacttgccgccatggcaaatatgaagggattttactatgacggtgactggggcgcacttgcaggaaagctgctgcaggaaaaaataaacttaacataaggaatacgccgcacagaagcgctttccttcgctgaaaaaacggatggcctgtactgtaatgtacagaaccatccgttttatgatgtctcacattttaaatcattcttttatacagattaatctcatattaattgataaaaagctgggtccagtaatcaacgcctgccgcactcttataatgaccgattccaatcgaggtaaaattaccgttcataatattcgctctgtggcctgcgctgttcatccagtcctgcataacctgtcccgcggatttctggccataggcaatattctcccctgccgcacggtaagtcacgcctgcggcggtcagagcggtggtaaaattacttccgtccggtctcgtatgagagaatgcagcttcgatctccccggctctctgctgagccgcacgggtcgcgcctgcatgaagtgtcagcgccggaagtcctgctttggcacgttcctcatttacaagcttcagcaccgcgcctacggcctcatcctgattttcatcagacggctggtcgggcgtcggcagactgttgtccggaagctccggtgacggcagactgttgtccggaaaatccggtatcggaagctccggcgtcgggaagctgttatccggaaaaacctctcccggataaccggggaactccggctggcagtccggtgaagcatggaatccggggatctggtttaaaatatggttgaaatccatcccgttgtttcccgtcaccataataacctttccgcctcctgtggaaaaattgtatgtatgaacggctgcatttgccgtcgatggtatggttccggccgttgccagtgccgctgctgcggtcagtgcgtatgcggttaatctcttcatgtttagtccctcctgattttgttacataattattacatttctgttacaaaaatataatagcacaggatgactggaaattgtcagggaaaaactggtaactccggttacagatacaggtgattggctttgcggccgctgcaggcctttttcatcttctgttctgccgcaaacagcagcactttatcattatgacgggcctgcgccggacatatggcaatgcagtgcatacaggaaatgcagcgatctttatcaactgacgccggattatcctccggaatcgcctgaaccggacattctgcggcgcacttaccgcatctgatgcagtcccggtccgccttcggcttcatgggaacgcctttatattctcgatacggatgatcaccgggcaccgatacttcgccgcttccattctcttccagatggattttgatccgttccgcgaatgcctttagttcccgccggtcctcctcatcgggcctgccggcaccgaacttatgtatgatcgaatgctctgccacagcagcagcggcagccatacagcaaaagcccgcctccaaaagcgcatcctttaattcgatcagcgtatcctcgaattcccggtttccgtaaacagccgccagaaccgttttggctccgccgccgttcatctttttcagccgctccagcgccgtctccggcactctgccgccgaacgacgggactgccacgatgcagatgtcagacgcagtaaaggagtatcccgccggttccagccagggattcatcagatcaatcctttctttttcacacgtccagacactcccgatgatctccgtgacctttttcgtccctccggtagggctaaaatagatttcatacagtttcataataccgcctccttcgaaaagtcctgtggttctaccggccatacttctcaaacctgccttttccgctcttcttcacccggtacatcgcctgatcagccagatgaagcatctctgtgcagtcaccgccgacctccggatagatcaaatagccgcccgatacactgatctcagcctccccgccttccggcagtgtaagcctggcttcccttatactcttttccagccgctctagacatgcatagagttcctctttttcatctgcgccgtagatcagcagtacaaactcatctccgctcagccgggccgccactttctcaggagctttcagaccggcaaataaatcggccgccgccttcaggagcttatcaccatactcatggccccaggtatcattgacatgtttcagattatccagatccatcatcagaagcatcgccgtcttcatccgccccggatctgcaaacagctggtccgccgtacggaaaaaggcccgcctcgtcaggaggccggtaagcagatcaatatcccgttcctgttcaatctgctgtttctccacgatcgcctctgtcacatcgatgacgattcccagcgtccttccctccccttcgtacgacgtaatccttacataacggcgctcgctcccttccaggaggtatacttccttctcttcagccagcggttcggcgcacagctccctgattcgttccacgaaaagcgtcctgtccgcaagtacagtgcgaagctcttcctccggtatcatcagaatctctcccagctttttcgtcgccagtacacgcctcatgtcctgattatactcgtaaacagcaatcggaatatcgacactctggaacacgaaagacagcttgccggtcgcctccagaaggcttcccaccatccggttaatgttggcgctcagctctttaaattccggcgtatggtcgatctccagcctgtaatcaagattgccggccgcgatcttctttgttccttctatcgtcccgtaaatatcacttaaaataaatttatccagcattttaacaatcaggaatacggtgacaaaggaaagtacgcacaggctgaacaggatcagcatcatattgttcggaacattttcatagagcttctcgtatgtggcgctgacccccaccacgatcccatccgtcagctccaccaggcagtaatttttcgttccgctgatatccagttccctttcataggggacgcctgtctccatgtcttcaggcagatgaagcccgagagcttctgccgcggttcctgccggaatatctcccgtagatccgacaatcgttcccgtctcccggtcaactgcaaaaatagtgaccccgctctcggtcgtcatcatggaaaatacgtaagagagttcatttttttccatagctgccatcaggcgggccggttccatcccgatctgtacaatcccctcgtgatcctctctccacaccgcgacgtactgcatcatcttaccttccgcggtattcggcgtcacatcctggcagagctgaagagtatagtcgtccagcataggcagaaaatactgcatctgttcaccggattgaaatgtataatcgtagtatttcggttcggaaccggcgtaaagacggcccttcttatcaaaaagatgaagttcatcgacccggagcagtgatgcaatctttctcatctcttccaagtcgtccgccacctcaggctgtttctgcacgatatatgccgccgctttcgcccggatgaaataatcctccttcagattctcccgcagttccccgatctccgtatcattccgttcgaggacctccgaaacctgattgaaccggagctccgaattcgttctcatcgcctcttttgccgacttcgtctgcagataatagcccagaagcgccatcattaccatggcggtaatgatcacggcacacagtctgaacgtgatggcttttttcatgcttcatcctcctgtctgattaccggaagcgcatcagttttggaaccattgctccggctgtggattgatataatggatatcaaactccgcccatctataatcctgtatcccatacagtttaaaaggttctgaggccagatatgactctatttcctccggattctccgctttcatgagaaaggcaccgccgctcctgtccgtcttaagccccgacagaaagatcatcccgctgtccatggccttctgcgtatacgccatatgttccttcataatcgcatcattcatacggtccgcatccagtatcaatccttctaccatataatacttcatgtttttacctccattcaccatacgttcactctctcatattatactgaataccggcttaaaactcaatgcattcttagcctttgcggtaaaataatacggccgtgttctcctataatcggaaaacacggccgcagaccttataagtatcttgcggtatgattgcttacgcttctgtttttactcttccaaagctcattaagaatcccagcttctcgatcgccttggacgccttccaccagttctcgctgactgcaaattctttcgggtacttttcccccaatgcaaaccaggtccatgtgatatcccacactccacccggttttctcgtatcaatgagataatccagctccttttccacgatctcttcattccccttgtaaaaggggctgtccggtccccagataaactctgatggccgcggtgtatagccagcccacttctctgtatcgcgctcgatggaacggtttacaacctccgccattttccccatcagtgcttcaccggggaatgacgcttctgccccgctcatcatcacttctcccagcagcatgcagactcctccggctcccatctccccgaaatcctctgtcgccgccgccttttttaagatcttttccgtatgttcaagtgccgtctggtatatcccggactccttttcaccgtaatgaaggataaaggcacacagtccggcggtaattcccatgctctgaagcttattctctgcctcgtcatagctccaccatggagcgcggggccatgcatcattggagggaacagaaaacagccagccgtcctcgtcgctgccggcgccgcttcccagatagcggaatatcccctgcatcatgggatgaccggctcccatctcgtcggccgctcctgttcttctcaagattcccgtcaccaccatcgtagcgtaaggcgatgactccggattccacacatccggctcgaccgcatttccaaagcccccgtcctcattctggtaataggacagcgcatcgattacagcctcccggcttccattctcaaaaaaataattccagacagacagctccagttgtcttgcattgcggtgaatccagctgcgtatctcctggtaatcctctcggttaagtactttcatattcctgatctccttccgtgttttaaccgatacgataccagaaaccggccgctttgtattgtaaaaatacgacatgctaccggttcagccgcgcgatccgccgcgcctcctccggcgccatcccgtgatagcgccggaattccttcagcaggtgggcctgatcggtataaccgtagcggtaaaccgcatcctgaatgtcaaatgcctccctgaacgccatctctctccacacattctgataccgtaccatgcctgcgatccgtttgatcggcagccccgcctcttttaagaagatccgctccatctgtctctggctgacacagctgtactcacagatgtccttcacggagatccttccggatgaagctagaatccggtggaccgcattgaagagatccggattccactcgattgacaccagttttttcagcaggaatttctccacgtgagcgatccgctcctccatgccggtcagatagaaaaacggttctaacagcaggctccagtccctgcccagctcctccagtccaatcgtagtgtttgaagtctctttataatttaaattcagaaaaagcccggcgctccagaaatagaaccggattgcaaagcagctgacctcatccccgctgacatggggaacggaatgaaacggctgatcctgaattccgcacaggaatccggaaatctcctgtctcgtatggttgatgcggacgataatgtctgcacacgtatccggaatcaccagaaccggagcccccggttcctttccgtccatctcctgcgggacctcatcttccatagtccaatagcataaaatataagggcgcagcaattcacacgggctgtattccctgtaacttcggtccgacaggaacggacgcgatgtaatcgggtgatacagcctgtgaaataccggtgcccctgactcaaccgccctgctcacgatgattcatggacagatgatccgtgctgcccggcattgcttcaaacgcttccttcggcatcggttctgcgaatagatagccctgaatcacatcacagcctgcgttcgttaaaagttccatattatcctcctctgtcatgttacccaaatcataatatatttgagtaaaattatcaagcaggaactaccgccatccgatgcccgcaggttcgccgtctgctgccagccggcgcggccagtgtgcaaatcgtgtcgaaacttgacaagtatacaaaaaattgctatagtattttttgtaatatttttgtaacatttatggaaatccacaattttacagaaaatcagaggtttttatgaagcatccatggaaaaatacccgggaaaaccgcgccgtcttaactgctgctgccattgcagctgctttgagtctcaccgcgttttcatcgccgggacacctgactttatctctgccggatacggcgaagacagatattgtcaccggcggcggttccgtcagcgtcaaatcggcgttttcggttccccaggccggtatcgagcgaaaagaagttccggtaacctacgctcctgctgcctccgaatatgataacaaggctgtagccaatgtcaccgacgtcctcaatctgcgggccgagccttctctggaaggaagagttctgggcaaatgctatcggggagccggcggcacagttctggaaaagaaagacggctggacaaagatccggtccggcggcctggaaggctggctgaaaaacgattatctcgtattcggccaggatatcaagcccttagccaaagaactggggctgtttacagccagggttactacacagacactgcatgtacgcgagactccttccaccgacgcggcaatcatcggacttgctgcggcagacgattattatccggttcttgaagagtccgacggctggatcagggttcagctgtcctcggatacctccggctatatttccagtcagtatgcaaaggtgagtcttactccagggaaagcagtcagcatggaagccgagcaggctgcattaaagactgcggagagtaaagaaaagaagaaagaggaagaaaaaccgaagtatgtgatcaatgcctcctctgatgaaatctacttaatggcagcctgtgtaatgatggaatccggcagccgttcctatgacggccagctggctgtggccagcgtcatcgtcaaccgggtaaaatccggacgctggggaaattccatcaccgacgtaatctatgccgatggccagtttccaggcgccacatcaggccttctggataaatatctggcaaaaggaccttcctccgatgcattaaaagctgcgaaggctgctctcaccggttcgaacaacatcggagactaccttttctttcaatcagcaaagcgcgccgattataacagctacgcttcctacacggttgtggatgggaactgtttctataaaaaatgaactaatcactcatttctatcaggaggtgttcgcttgaataaaaaaattattgttattgaggggtatctggcctctggaaaatctacttttgcagtacaattatccaaaacgctgactataccatatctgataaaagatacctttaagattgcattatgcagcagcctgtctatcgcagaccgatatgaaagcagtcgtttttctgctgttacatttgacgccatgatgtatgtaacggaaagacttatggaaacaggatatccattcattatcgaagggaattttgcacctgcgggaatcaaaaagacagacgaatccagtgtaataaaaatattgattcataaatatgattatacaccattgacgtttcagtttatgggcgatacacaggtattgcatcagcgttttatcgaacgagaaaatactctcgaacgaggacaggtaaataaaatgggatttattccttcttataatgagttcgataaatggtgtcataatcttgatatgtttcatatcggcggaaaaataataaaagttgacacaacagattttagcacagtggattttaccggttattttaacacagccagcctgtttataaattcataattagggcgcccatgcctgcgtacttatagaaagcaatgtcaacaggcagaaaaacgtgccgaaccgccggaaatcatcgtatttcccggcagtccggcacgtttctttttcagcacgtaagttccgtttcagccaatgattttctgtttactgcatgccgttttcgtcctcgcagtagatctcccggtccagaagttcctgcagacggtgttcctgcagttcctcgtgaagcttactcccataccggacccacatggcatcttcccggaatatgtactcgcagttctgcagctgttccatgtcctcgggcaggatcgtatagaccctcttgccttcctcatacagttcttccgcggatatctccgcttcattcccgcgatgatacccgcttaagtccacagcacggatatggccatccgacagggctatcaccaaagcgtcctttcgctctatcacatccagtaatttttccatctccagaatctcctccctgaactctgcgttctgacaatcatagtatcattatacagaacatacgttcttttatcaactactattttttgtcacagttcttcttcggcacagtttgggagttctggtctctaatctctcgtcagcttcctcatccagtttccatacctcacctcaaggaaggcaggaaccaccttaaaaatctgatccgcattcaggcagcagaccaccacgaccggagaagcctttacgacaaatgccatgaaaagggagaccggtatgacgatcagccagatactgattaaatccatcttaaccacgaacatgggatttcccccgccgcggataattccgttattcgtcggcatctgataggacatccccacgcatacaacgcttaaaataatcaggaacgtgtttgccatctcccgggtttccgccgaaaggtcatacaggcttagtaccggtatccgtataaagaaaagaagtgtgccggacacgattccgatcagaacgaagattctctgcaggcttcgcgcgtagctcacggcccggtcacggtctccgcttccaactgcctttccgatcatgacggacgtggccgcagctgatcccaccgccatggacttcaccatcaaaaacagggtcgacgccacactgttggctgcgatggcattggccgtcatgtgccccagaatgaccgtctgcagcgccgtattgacaccccagagcccctgtacggtgagcatgggaatcgtaacttttaagtagtcaccggtcaggatgcggtcccacgcgagataatcccgccattttaagttaagcttccgctctcttttcgatatgtagagaagtaaaacaatacattccagaatccgcgcggccagagtgccgatggcagcgcccttcacgcccatctccggagctccgaaatgaccgtttatcagaacgtaattgattccgcagttgacgaacagagtgagaacagacagcttaaacgcgatttttactgtctcgacactgcggagagtagccagaagaatctgtgtcactgcaaaaaacaggtaggtaaatcggataatatttaagtaccgggcaccctctgcgatgattccgctgtcccgtgtgaaaattcccataacgcggtatggaatcaggctcacgaccgcaaacagagcgatggacagaaccagtccaaagcgcatggccgccgatgccagccttttcatgggcacagtctgattcttcccccagtactggctgcccacaattaccacaccgtctcccagcgcgtgcagaagctgctgatagacgaactgaatctgattgactgcggccaccccggccagagccgtctcgctgtatgctcccagcatcatattgtccgccagatttacgctcagcgtcaccacattctgcagcaccagaacgaccgccagcgacagaaagcggcggtataatccctcatccttttccacaaacatttcccccgtatatcaaatgataccgttattcggcagtatagtccctgtttattatacctcgccgggaaaattttgcaagatggaagtaggggatgggatgtccccgtgattatcactgcggcagagacctcacgcctttttcacgggcagcgccacgcagctttctctttttacaagttctgtcggaaactcgatattgactgccgatgtatgccccttattgatccggtccagcagaatcttcacagccatgcgccccatctccctcacaggcacattgacggtcgtcagcattggcgaaacaatctgtcccatctcgatattatcaattcctacaaccgataattcttccggcaccttaatcttaagttcccggcacgcccggataataccgaccgcaatcatatcacagctgcagaaatatgccgttggaagcagatccttctctgcctgaaggaaggcacaggccgctttatagtcaatcccgaatgcagacttgtagccatggatcacagattcatcgatcttcatgttgtgctcggtaaagaaatcaaaatatgcatcatatgcagaaatgtcttttaatcccgcgtaaccgattctgcggtggcctaaatcatacaaataccggatcgcggttttcgctgcctcgtatccgtcacaccggacccggtcaaacgggacctcattcacatcaatcccaaccaccaccacattcttgaatttatcccgcaaaagccggtccagatcacttcccggttttcccagcacaacgatcccatccttttccagctggctgatcctctcattctgtatttctgaaatatgcagcatggaaaaagaatagccgaggggacagccctgaacaagggcttcctgttctaccgcctgtgctatcggagaaaaaaactgttctgccacagaattttccgttctggcaaaaaggcaggagatattgcggctcattggtctttttgacccgttcttttttaactcttttgccatcaggttaggggtatagcctgagttccgtacaatctcccacactctggcttccgcttcccgtgaggtgcacttgtagttttctttattgataatcctggatactgtcgaaacagacagtccggtctcctgtgcaatttcttttaatgtcataccttctcctctctgtatgatacccctaacctccgttcgatggtaatctgtctcaatgaaaaaacggaatattgtcgccggtttctctctgccactcttttaatttcttcgtcatctctgcctggaccgcacggtagtccggatcgtcataccggtttttcagctcatacggatcagccttcaaatcatacagttcataggtctgtcccagcgtagcaatcagcttgtaattttcatccgtgactgcccttgccttcacatactccccatacccaagaccatacgtttcgctcactgcgtactccggcttccgttttccctggcagatcggaatcaggctttctccgtgcacgctgtttttgtacgttaatccggccgcatccataattgtcacaggcacatcgaccgtgcagaccggagcatcgatcttcattcccgcctctatggttcctttccacttgattcctaaaggaactcttaaaacctcctgggataaatacgaccctttgtcgaaatggcctccgtgacaggcaagaccatcgccatggtcggcagtccagataatgatcgtattttcttccattcccagttcctttaccttatccagtattctgccgacagcctcgtcgatcattgtaatctgcgccgcacagcatttgagcatctcttcatatgctttccagtcaagagcattgggaataacgatgcggttgtcttttccaatcggtacatttttctccgcgaaataaacctccggtttcccatcgaggccgctgctgaaactggcatagggcgggtaagagacatccttatacagatcataatactcctgagttggaaagtatggctgatgaggtccccagaaatccactctcagggaaaatggagcctcctctccatctgcgctcagttcttccagtttttcacatgccaattctgacaggaagaaaaattccaatgtttccttgggagtcaccgtaattccgtaagcggcttcacagcagtgtctggggtcctgcagtttaaagagttctccatttctcggcacttcatccggagagcccttctgatacgcctgctggctcttatccgcccagaaaaagaccctttcgatccggtgagcggccgccggaagattccgttttttcaaatagtctttatattcctttgtgacatatggattcccatactcctccggagacaatccttcgcagtgatggtccagcgcacaccccggccctgcatgccatttgccaaaatagtagttccgataccctgcttcggccagagaatccagatagacttcatcgctgtacggcggattggtctcattgtgatactgtttatgtgcatgcggatacagacctgtgagaagcgttcttctcgacggcccgcacagaggcgccgcacagcaggcgtgtgtaaattccgctccttcctccacaaattgttcgaaaaacggccgatacggcttgttttcatagaatgtccactgatgcagtgcctgatggtcgctgttaatcatgataacgtttggtttcttcaacggtttcacctctgttttcttttattccgagacgtatcagctgttcctgcggcgcctgatattccaaaagtgcggcgcgcagcttctcaatcatttccagttccagcgccttatcttttatcggtctgttctgacatggatctgactgaatgtcaaacagtaaattctcccgcacatagtccagtccttccggacattccggataatggccttccacccggtatctgaccttatagaccgggaaatccgtatacggcagaaacgttcccatctcataatcccctggttttatatcccaatacttcaaaaatgtggtcggcatcgcaccatacagaaagcacggctgattatcttcggataccggagcacggaaataggtatgtgttccgtccgtcacattaaccgctttgccaaaccagccatagaccgccttatcacgaaccggcgtatcatgcggaatcattggcagcaggctctttccctgtacgttctttggcgtctctgtcttaaaatactccagaaacgtcggcatcagatcaatattctgtgtcagactgctgatccgtttgcccgcatatgcagaaccgggcagatgaacgaacagcggaatatgaaccagctcctggtaggcaggcatgaaatttttcgccgcaaatccgtgttcccctagcatatggccgtgatccgacgtcaccacaatgagggattcatcatatatccccgtatccttaagcttctgaataaacgttccaaaccagtgatccatcatggtcagcgttgccgaatactcattccgcaaatgttccattgcctccggagtctcctcattaagcgcctggtatgacggccagtcgaaatacggtccgtcatacgcatcgggatacagttccctgtaattttccgtacagtcaaaaggctcatggggatcaaaggcttcgaccatcatgaagtaatcatccgcatcgcggttgctgtcaatccagttacatgcagacctaaaagttctcggcgtcggatactcctcctccttcgtataggccagacggtttaactgattctgacgattgacctttccataatgcggctggggaatatcgcttcccttcactctcgatacccagacatccccctcctgcccccgctcaaagttccacgtatgaaacatctggcagtagttctccccaccgatctcaaaataatgtggatggtccgttgtgatatgtgtgaaaatcccatgctcccgaagtttactgatgagtgtaacatcaaatggttccataccgccccagtttctctccagaaaattgattctccccgtaaagatatcccgtcttgcaggcatgcagggagcggaagccacgtaatgggaatcaaaggtaatattttcctgtgaaaatctggtcaggtgttctgccgtcaccttagtatccggattatagcacggaaggaaatgacggtttaaactgtcaatcagaattaaaaatgctttcatttaaagtgttcctttctatctctttttttggcgcactcaacccttgacagatccggagaccagcccgtcgatgaaatagcgctgcgtgatcataaagaaaatgaggactggcgcgattaagatcatggctccggccatcataatcccgatgtccgatccaaactgccctgacatgctgcgaagcatcagcgttgcagtgaaatttttctcaccctgaagaaaggtcgaggtgatcaggaactcattccatgcgttaaggcccacgattacgctgacggtcagaaggccgggagacacaacgggcgccataacataccacaatacgtgccccgtattggctccgtcaattctggcggcttcctccagttctttgggaacgtttaaaaagaatgtccgcatcagaaacagcgccagcggtatatttctggctgcaagaatgaagctgatcggcacaaccgtacccacgagttttaaataggacatcacataataaagcggaaataaaaacagctgaatcgggatcgtcataacaatcatgaaatacacaagcgccagattcaccacttttcctcttcttgtggcgagcacatagccgcccagggtcgaggtaaacagcacaatcactatcgtacaggccgccagaatgatactgtttttaaacccgatgccgaacttggcatagctccatgcgctggtatagttgaccggcgtaaagctctccggccaggacagcggattggcgacaatcgccacatggggcttgaagctgttaagcacgacgagtgcaattggaaacagcgccgtgatcaccaacagaatcaggatcgcatgaaccgtaaccagcgtgacgatccgctttttcttacccattactgccatataaactcctttccggcacttggcctctatgacataatctcattttgtgacaggtggatgtagacaaaggaggcaagcagcccgaaaaagctcatgaagagagcgatagctgccgcctttccaacctgaagagacgcaaatgcaaacgtatatgcataggtactcagcatctccgtagagtgcgcaggacctcccgatgtcatcaggtaaacataatcatacgtcaggaaagaatttatgacagacatgatcatcatcagcttaaaggttggaagcatattggggaaatagacgtagcgaaacagctgccatccgctgcatccttccacccgggccgcctccacctgatcctccggcgtctgccttaaggaggctaagtagaccaccattaaaaatccccagtagtgccagatatctgtggcagcaaccgcatacaaagcggttttcatatcgctgagcagagatggaatatgaaagccctgacggtttaaatagcccaccagtccgaaaatcggattgtaaataatgttctgccatacggccacattggtcactggcgcaagtacatatgggaataaaaacaacatctggtacagtcccttgtgtctgcggttcagcagaagcacggatgtcaaaagtccgatcaccacaggaattgtcagaaacagcgcaacccatctcacattgtcatagattgccctccagaatatcttatcaccgaaaagctcggagaaattccgcagtcctatgaaatgaaaattcatggaaacgccattccagtccgtgaatgacgcaaatatcgtcatcacacctggaataaacacaacggccatgctcagcacaaaagccgggagaagcaatagataatctcgtctgcgtttcatttttaccctcctttgcagcagagccggacatgtaatacccgtccggctctgtctcctcctaaactgatttgcccgcccgttctaccgttttggcagcgggactaccaggccattggcaagttccttctcaaattccgcatccgttctatctaaaacctcctccgcgctcatggtcccaagccacacaccatcgatatcctgcagcgcgacatccgtggccggcggacagaagctggtcgtataatatccgtaatttccttcctcaatcgcttttaaggtatcgatcataacgtcgcagaacaccgcggagatccccgtcatggtatctgccggtatatcatattgtttcagcggaattgcccagtatccgggccaatccttcgtcagcttgaccataaagtcgttcgtcatgatcttatccagaatctccgcacactcgtccttgtaaggagaaaaagcgttgatcgacaggcaggaggtaacccccagcgtataggtcggatatttcaccttatcattggtagccgggaacgggaagaatccaaaatcgtcttctgtgagaccccggaaatactttggtgcccactggaatacattggaaggtccgacgaagaaaggcgccatacccatggacaaaagctggacgctctcatcgaagttcagatccgtatagttgtcaccgccgagccagccgttctgataccattctgccgatttattcagcgcctccaccatatcggggttgttccatttcgcttcgcccttcagacattcatacaccttttccggtcccgcgatatggtttaaaaacaggctggaatagttggcattgacaggcttccatcccttattgcccgttacgcttccgtaaagacctttctcctgggccgccttcatgattgtctccatctcctcaatggtctccgggacttcccagccattatcagcgagcactttcttattatagaagacgcccatgaccatcagggagttcgacaggccatagagcgatccttcgtaagtgcccagattatagatcggttccagcagccggtcgttccagccgtacttctccgcgtaccggtccagattttccagcttaccggccgaagcgtaattggtcacataagaggggcctgaagtaaagacgatatccggtccgctgttggctgccagcgctgttgcaatgttctgatcattacccgcatggaattcaatgtttaatacgtagtcatcctgaaccgcattgatgtcgtcctcaataatctgttttaagagaacctgctgatccgccggagcgctccagaaccacagagaaatctgctttttctcacccggtgccgtctccgccttctccggagctggtgccgcttccgccgttgtactgccttccgcagtggattctgcggcagccggtgacgtcggtttctgatccgctgatccgcatcctcccagaagagaggcggccattaccgccgacagtaaaactgataaacactttttcatcttttttcctcctttttctaaatccagccgctgtctttggggctgcttacgtactccacagacagaacatttcacatgcctgataagcacatgacctgtttgaatatagtggttttcttgcttcttgtctttttttacataatttttacttatcatgataaataattggtaattattaatacaaatatattttatcatgattttatcttttgttaaaggattatatatgagaacgattgcaccttatatatcactatgtttttacataatttatcatttatttatcttctgtatggcactgcattatcaaattgatgaaaaagaaggcagagaatcctgatgaaacagtactctctgccttctttccatactatttaattattgactttctccatccggcatttagtgccggtaaatgctttaatcatttatttttataatacgctgtacagaaatcaacgcattctttcatatccattacctttgccagagaaggggtaaaggggccaaattcctttataattgtcttgtcagagcccctttcataaaaaagcctttctatttcccggaaatcatcgtaaatatccagttccacatttttaaattcaacccactttttttctccgtttactaatataggggcgcgctcaatgatatcctctctgttcaaatgatactcagctaagtggattgatgtattggattcaaaatctgttcctaataaaataatcttggcacccatctcatatagctttgccagaggggactcatggccaagcccataatccagcttatgattattcgtaatgtaaccggcttcttttccatatgcggtgaatgaatacaatggatggctgcttcgccgcgaaccaggatagaaggcgaaatagccggctgctttccccaattcctccgccaccggagtttttcccggatcatacggctcgatactgtttcggatatcagccagccatgcctccggaaccagaggattctcccatgatttgggatcttcgagctgcgtagtctgtgcgggcatcaccaaagttcccgccggaccgattgtttccagaatcgattcaatcatggtttgctctcccccaagcagaaaaccgaacgcacgcaatgaagcatgcagaatcacaacatcgccatatgcgataccagtctgagttaataaattcatcagatcttttttgtaaaaaggtgttccattctgatcaataaacttctttaaatttctcattcacctatatcctctctttatgccacttcggcctgacaggtgtatttcttcatagcacatatgcatcaggtctgattttcttattagcatagcacaccaaaatcaatctctcaatcataacccgttttattttcagagataaaaagaggacccgtgtactcctacagtataaacatactgtaagagtgccagatccatcttctgatttgttaccgcccctctctcaccggcacaaactttgcccggttcatcagcggatgctccagtctgacagccccttttaccggacacgccatgacgcaggcgccgcagtagtagcattctcccggatacataacgatgggcggttttcccttcgcttctgatggaagcaggatatcgcactgacagaccgatgcgcaccggttgcatccgatacagaggctctcatcgtaaatgatcggcctggcactgctggcaaccggcctcactgtaaattcaggctttttcatggctgacctcccccatataatcctggttgcgccgttcgtactcctcctggagatttccgaagaaatcgagaggaacgcttcgttccctcacctggccgtcctcctggcggatgacgatgtgacgccgttccccttccgggtccatctgcggataatcacttcgcagaaagcacagcggttgcgaactggaacgccgccgcagacaggcgtgaagcaccagctgcgcaacagtcaaaatgtccagcacctcatgggttctcatgagatcgtgaggattggcgcacgtcagagtaggtaccacctcccgctcatagttctccaaaagatcgagtccctcctttaaaagggcctcacatttcactccgccgcagtagttctgcattgtcttggatatcgccatgttcagctctttccagccggttccttcctccacgtaaagcggtgcatacagcctctctttttcccgatcagcctctttcctgctgaaatccgccatctcgtgatccgaagcgtaaccggccgcctttcttcccgcataatacccggtggcacaggcaaaccccgcacagtcagaagcatacagctggtctccggccgcatagatgccgtcgatattcgtcattaagtcccagtcatgcatgattccgcccggagcaccgaaaaactggcgttcctgttccagaaaactggcagactgccatccggttccatagctttgcagcatactcgtctccgggtcaaatccccgctccgtataattctccagaatcggaactctggtctttgcttcctcaccaaccatcattccccatatgacacggcgctcatcctccggcatacggctcaaatccgcataaaacggaagctggtatccccggcgaatcagctcctcaaagtccagggtctccgggccgcggtattcgtacttaggattgtctataacaccgccttttaagaagaatttctggcctttggccggataataccgctgggaaacggttttcagttcatttccgtcacggtccacgtatggaatctccacgcctctggcatccaccatggtggccgcataccaggtgttgtggttattgcctgttccatatgcgggaaagcttcttccggcaccggaaaattctgcccgcaccgatttctccatcatggtaaattctacaccggcccgccaccccatggcgtgaccgcttccgatgctctgcatgggtcggaattcacataaacctaccagatccggattaaacagccagactctggccggtctggacatggtgagaatcgtggcttttgaccggaagatatagaattttcccgtgtggacatccatgccgcaggccccggccccctttttcttcccatcctgcaccgcagtcaaaagagccgttgcctccgtcctctcatacaccttcacacccagccttttcagttcccgcgacagagccggcttaaaggtggttccccagacacgcagtgtaaatttgtttttataatcataggcaaacatcagcttcgtcttctcatcccgaaactccgcccccttaaattcatcctcggtatcccgtacctttcccccaaaagcttccatgtccaggactcggtcgtatccctcacggcattcgatatagtgggcgattccgttgctgtaccagtcctgctcacggacataggcttctgcgatttcctctggtgtcactccggaacagggattggtgcaggctgattcccagtggtcaaaccccgttccggcagatccgcttcgttccacggctcccttttccaccagcaccacggattttccttttctggctgctgctatggcggcaaaacatcccgccagcccgccgcccagaaccaggacgtcgctgattacagtctcctcagccccaatctcattggcgtaaggccatctgtatgtctcttcactcatgttactcctccattctgtccagacaacccgggcatgccgcatagtgtcccggaccgacttccttaagtaaaatctcaccggtcctgcattcgcctttgacaaacgggcatctcgctgcaaaccggcatcccggtcccggatttacaggactggccacctcaccctgaagcagagtcctctttttattccgcgaatccggactgggatccgggatcgccgcaagaagcgctctcgtatacggatgaagcggattccggaaaagctcggccgacgacgcctgttccacacattttccccggtacataaccatgatctcatcggatatgtgtttgaccacagacaggtcatgggtaataaacagatacgtcagattcatgctgtcctgaagatccattaagagatttagaatctgtgcctgtatcgatacatccagtgccgacaccggctcgtcacatacgacaaaggccggttccataataagcgctctgccgattccgattctctgacggcgtcctccgtccagctcatggggataggctcccgcaaggcgtctggccaggcccaccgtctccatcatggcgtccactctggcctcgatctcctttttatctttacagaccttattgacaatcaggggctccgcgatcagctggcgtacattcatacggccgtttaagctggaataagggtcctgaaaaatcatctgcatcctgggacgtatccgtttaaattccttctttcccaccccctgaagactggttccctcaaacaggatttcaccgtccgtgggttcgtcaagatacaaaagcgtagagccgagagtggattttccgcatcctgattctcctacgactcccaatgtcgttccccgcctgacggaaaagctcacatcatccacggcgtgaagcagcccggagggggtgtcaaaatatttttttagatgctttacatcaagcagcagatcttccttcatttctgccctccctctctattgccatacagatggcagcgtatcagatgaccgttttcatcgtacacggccggcgccgtcacgctgcactgctccatgcatttcgtgcagcggggtgaaaatttgcatcccttcggcagatccgtcggatccggaagaattccttcaatcgggtgaagccgcttcgtctcctctgtaaggctgggaatggaaccaaacagtccttctgtatagggatggtgtctgttgccgttaaagatatcactcagagttccatactctacgatctctccggcgtagacaatggctaccctgtcacacgtctccgcaactacgcccagatcatgggtaatcataatgacgctggttccgtattttctctgaaggtcacagatcatggtcagaatctgtgcctgtatggtaacgtcaagggcggtcgtcggttcatcggcgattaaaagctccggactcagaatcagtgccatggcgatcaccacacgctgacgcataccgccggaaaactggtggggataattggccttccgctcctttggaatccccaccatctccagagtgtcctccacccgtttttcaatctctttcttcgtcagaccttcggtgttgtgaagctccagggcctcggctatctgactgccgatcgtgaggactggatttaaggccgacatagggtcttgaaatatcatggatattctggctccccttatcttctccatctcatgggggctgagttttccaagctccatcccctcaaatcggatggtccctccggtgatctttcccgtccgttccggcaaaagccccaggatggtcagcgccgtcgtggtcttacctgcgccggtttctcccaccagccctaaggtctccccttttccgagggaaaagctgattccgtttacggcgtataccgtctccatatccgtctcatatacgacggaaagattgtctatctccagtattgtttcactcattgcgccacctccttagtccttcagcttgggatccagggcgtcggtaagcccgtcacccaccagattgaatgccagggaagcaagcaggataaagacacccgggaaaaacagcagatacggtgaagtaaacatatatttctgcgcaccggaaagcagcgcgccccattccggagacggaggctggattcccatgccgataaagcttaagcctgcggccgataagatcatcccggagatgctcatcgtcgtattaacaatgataggtcccatggcattgggaagcacataacggaaaataatacgggcattggaggtgccataagacttggcggcccggatgtaatcctgttccgccaccgtcatgacaaccgaccggatcagccttacgtttcccggaatgcaggatatggtaattgctataatcagattctttaagttcgttcccagtgccgccaccacggccagggacatgagaatcggcggcacacagataaatacatccatgatccggcagatggtgttgtcgatcaccccaccgaaatatcccgcgctggctcccagcacggcgccgatcaccagtgccattaagctggttgaaacaccgataaagagggagtatctggaaccgtgaacgactcttgcaaacagatctcggccgtattcgtccgttccgaaaaaatgggatgctcccggcatcagaagccttgctcctccatcctgttcgatacacctggagtaagggacaatgaggtcggcaaacacggcaatcgcgacaattacaatcaggatcaccagtcccagcatggcagccttatttttcttaaaccggtaccatacttcgttcctgacggcattttttcgttttttttccttatccacggctcttacctccctcctggtacttggccttgattcttggatcaatgaaggcatagagaacatcaaccagaagaataatgaggccgaataagaaggccaggaacaaggtggatcccatgaccacaggaatatccttctgacggatggccgtcgtaattaaggttcccatgcccggcattgcaaacacggtctcggcgatgatcgcaccgcctaaggaggcgccaaagctggtccccagcgttgtaacgaccggaaggagagcatttctcagcgcgtggcgcatgataattctcttttctcccgctcccttggcccgggccgtccggatgtactcctgcctcaccgtctcaagcatggcggacctggtgagacgaagcagactggccgccgatcctaaggatatggtaatggtcggcaggataaaatgcttcagtgtaccggctccataggatggcagcagccccagatgaagagaaaacaccagcatcagcatgagccccagccagaaacccggtatggacgcaaacaccagtgccacgatcacacaggtatgatccaacacggaatactgtctgactgctgatataatccccagcagaatcccgataaccgcagacagggacatggaaaacacggtcaggagcagggtgttgggaaatcttgcagcgatatcctgaatcaccggctggcggctctgataggacacccccagattaaagtggaacaggatatccccgatatagcggaagaaacggatcagaaacggcttatcatacccgaattccgcattcagcgccgcgatatcctctttcgacgccgtaattccgaggataatggaacccggatctcccggtgtcatggataagatggaaaatactaaaaatgcaactcccagtagaacagggatcatgtacagaagccgcttggccacgtatttagtcatggagaattctcctccttcaacagataaaagccttaccaggcaaaatcatagatgtaatatactgcctcatacggaatctccgggcatttcagggaggagctgtatgcgaacagcgtaagcggattagcaagcggaatgtagatggcttcttcctgcgctttcgtaaagatctggttaaagagttccgcacgttcttccttattgttggaaacccgtgttttgtcaaacagagcatccatttccgcatccgaatatctggcattattagccgttccgatgtaatcgctgccgaacgccatctccatcatctgggtatcgccctccagcgtcatgttcagtgcgctgatcgtatagctgccgctggtcagatctccaatataagagttgaattccttgaccgatatcgtcgtctccatcccgactgcctttaagtcattctggataaccgtggcaagattggaatacttttcagcaaccagcatctctcccagctggtacggcgtcgctatgccagcctctgccagcagctctttcgccttttccggattatactcatactttggctgttcttccgagtaaccgaagcggttggcggaacataagttggaatttaccgccgcctctccgtcatagcagatctgtaccagattctcgcggttaatcgcataattcagggcctggcgcactctcacatcatcaaacggggccttttccagattcatgcagacataagagaagctggaggtagggatctcagcaatggttacgtttttgtccgccttcagctgcggaaggctcgccgaatcaatttctgcaaaatccacttcgcctgtctgaatggcgatcgccatggtagactgatccggaatcacttcaaaggttaccttttttatcgcggcctccccgcggtaatagccatcatacgcttccagcgtcacattgcttcccttgcttcttccggtaaacttgtatggaccgctgcctaccggcttattgacaaaatcatcggccgactgttcaaaataggcttcggaggcgatatgtactgagcacgcccctaaaagaaacggagaatacggattttccagatggcagacaactgtataatcatccggcgcctctgcactggccagacctgtcacctgggagttctgatactgggagtttttgtacagattcagggaaaaaaccgcatcctttgccgtaacaggagtgccgtcgtggaatgtggcgtcctggcgcagatggaaggtataggtcttcccgtccccgcttatctcatacgactcagccagacgcggttccggatcgtgctcgccatccggattcatatacatcatggtgtcatagacctggtttaaaacggtaagttccaccgttgtcgagtaatcggaaggatgaagcgtgtcgatatcggcgcccatcgccaccaccatttccgtcttgccggaatcggctgctcccgtgccggaagcttccgctgaatggttctccgcagtgtctgcagacccggaacctccgcaggcggtcagtgacagtgccatcaccgccgccagaataactgccatactctttttcataattgtactcctctctctaccaatggataaattctatttcttctctcttcaggaagccggcttcgctgcaaaaggctctgaccgtctcctcatcatatagattcgtgccctgaatgaccatctgtacctttctcacgcagccgatatcggcaaggggattgccgtttaataccaccagatcggcatccattccctcacggacacggcctttcttctctccgattccgatatgttcggccgggtttaccgtagccgccttcagtgcctcatacggactgcagccataaagttccaccagcttttccagctcatccgccatggaaaagccaggaatgatgcccggataggcacagtctgttcccgccataaaccggttcgaatattccataaatgtccgtcctctgccgattaccacacggatatcagggcggatgccctggccccggtagctctcgataattttccggtttttgctctcccagctctcccgttcgcactccggaagatccttaaaatgcgccagctccggcagtgtcttaccattccagacgtaatccggcagtgtctcgcatacggtctgggtgggcgtaaaccacatcccggattcagccagatagcggatatccgccttgtgggccggaagagagctgctgtgctcacagcagaaatagccttcatccgccaggaccttattatccagctttttactcatatgaccgcacacgggcagcccctgctgtttcgcccgtttcaatagataccggtacagctccggctctatggacggatacgtctttagccataggaacccatttccaatcgtatactcaatggcccgttccacatcggcttccgtccggatgatttcattcgtattatccggtatggttttatcttccccgtcgcagattggaccgctggaataaatgtaaggacctgtccgtcttcctgccagcgtctctgcggcatattcggcatggcgtttatagccgcgcatgtttctgacggaagtaattccacaggccagaaacagctttcccatataatcggcatcgtaatgacagtggccgtcaatcaggcccggtatcacatagcggccccttatatccaaaacctccgtgtcacactccggccaatccgtccgctccgatgttccccgctgtaccgcttcggccagatcctttccgattctctgtatttttccatcctttatgaaaatatccgtatcataggttatggtgcggtccttcatcgccaggatgtttccatgtgtcaatatgtattgtttcacccggtacctccgtcaccttcagaaactgaattcgtatctggatactgcagtacacagcctgactcccgcttcgatgtcatccttggacgccacacagctctggcagtggggatatctggtcacgacggcgataccgcctgctctggcacccacgcccgacatattcatgctggaagcgtccgtgccgcctttgtcaatcacctccggctgccagggaatctcatcacgcccgcagcactcctccatggcggcaaccacttcctcgtcacagatcaccgacggatccgcatacttgattgcaattccctttccgacagtattgctgccctccagatcacagggataatcatgcgccggcgtgatgtcaaccgcgattccgatatcgggacggatccgttccgctgtcggtttggagcctctgcatcccacctcttcctgtacggtaaatacgtaatagatatcgttgggatacgtaccgtcattctcctttaatgcctctaaaagctgataacagccgatccggtcatctaaggttttagaacacaccagattattctgaagatccacatattcgccgtaatagccgcagacagaaccgactttgacgtattttaaggcatcctccttcgattttgctccgatatcaagatagagttttcctacatcgttatgggcatcctcgatggctcccatgcacccaaagacgccggttactccattgcggaacctcactctggcattataggcggaagcagcccagttccagcctacgctgcagacgcgcagccgtccatcctcctcaatcttctttaccataaaaccgatttcgtccatgtgggcggcaaacatgatcttcttggactttggtccgccctgtcccttcttaaagacaatcagattcccaatagtgtctgtcatcatatcgtccgcataggctgcggcttccttcgcaatcagctctctcacttctttttcataaccggcaattccctgagcctggctcagctgtttcagcaattcctcatttttcatatgttcttctcccgttctctgctttttcgctttaacgcgtcagatgattgttgttttaagaattgtaccatcttcgtttacattttgcaatatgcattttgcaaaatgtaaaataataaggttgaccttcattttcttctgttgtaatatgaatatataataaagattttcattcaggaagggatcacaccatggatttaaataaaaccacactttccgggcagatatacgatattctccgccaggatattctgacacagcaaatccggctcggtgagaaattgacgctgaagcagttgcaggaacgttttggagtcagttccaccccgatccgcgaagcactgacccggcttactgaggacgaactggtcgtctcctgttccaacatcggagtcaatgtcataagcatcgaggagcaggacttaaaagagctctatgaatttatgggggatttggacgccctggccattctctacacctcccgctatcccgatcagaaaacggtcgaaaaggcactgacggagaacattcgttacacggaggcagttcttgagaaggaacatctgtcgagagaagagacggaggcatggacgggatattccgatcattttcacctgattttttacgactactgcgccaacagccgtctcgcacgggccgccgaaaagcagcgcagccagctgactattttctccaacatgtatgagacatctctgcagcaccagcgggacattgaacgcggacatttaaagatttatgaggcttatttacagaagaattatcagctggcagcagatcttatgaaagaacatttgaatacgtctctgacgtatgcggcggagtacttaaaaaagcttgagtccgctgattaagagaagaagaaaacagtatggaaatagaaaaaccaggcagcgcagaattggtatgattctgcactgcctttcttttattgtgatcagattttcctccggttctcagagctctcctgcatgcgccctcttaagcacctccgccagccgttctttttcttccctctccatcggagtcagaggaagcctgcagaactcgtcacagattcccagaatagagagcgcagctttcaccgggatcggattcacctcccagaacatggcctccataacctccatcagcttcagctgcaggtttctgctctcctctattctcccctccagaaacaggcggcacatctcatgcatctcccacggcatgagattggccagtaccgatatcacgcccctgcctcccagcgccatcaccggaacagtcagatcgtcactgcccgaataaatatcaaactcatccccgcataaagcagcggtcttcgcaagcgccgataagtctccgcccgcctccttggtccccctgatattgggatggccggagagaatctgatacgtttccggccgtatcgatacccccgtacggccgggaacattgtacagaagaatggggatatccacactgtcccccaccgctgtaaaatggcgcaccaggccttcctgggttgctttgttgtaataaggcgtcacctgtaaaagcgcgtccgcgcccagcctctgcgcttctttcgacagctccacggcatgtcttgtgcagttgctcccggtaccggcaatgacggggacccgcccatccacggtctcaatcacagcctcgatcacaacaagcttttcccggtcgctcagcgtcgcagactcgccggttgtgccatttaccaccactgcgtcggtcttcccggccagtactctgtctgtcagccttcttaaggctgtaaaatccaggccgccgcctggcttcatgggagtgaccagtgcggcggcgcttcccttaaaaatactctgtctcataataccattctccgactctttctttatacttaaaactatgacaaccttttgtcaatggtacctgtcacaatccattttttattttcatataaaacaggagaaccccatcttttccggcggcacgcaaaacctgcagaccgctggaggctttaaggcgaaaggagcttctgcatgcatcaatttctgatcctgggcggagatcccaggcagctctacctgacccgccggttaaaaaaggccggccaaaagacgcttttatactatgacaattccactcccgcattctcactcagagatgcaatggagacttccgatatcattctctgccccgtaccattttcgaaggacggccataccattttctccgacaatcatttggaagggctggagatcgacacgtttctgaaccatttaacgaaaggccataccctgtttggcggcaatattccgccttccgtaaaggcgcactgcgagtcccggaggattccctgccatgattttatgcagatggagacggtcgcctgcaagaacagcgccgccaccgcggaaggggctctcgcagaggcaatctccttaagtcccattaacctttataaaagccggtgcctcgtattaggctggggccgctgtgcccgcacactggcggaccggctgaagggactgggcaccgcggttaccgttgccgccagagacgacagacagctggctcatgcagactgtctcggatacgatactgtgctgctggaggatctggccagtgacatcgaccggttcgattttatctttaacacaattcccgccatggttttggattccgttctccttgaagcggcaaaaccggaagctgccattgtcgatattgcttccgcccctggaggcgtggatttcgaaacctgcaggcgcctcggtattcctgccaaattatgtcccgggctgccgggcgtctacgcccccatgtcctcggctgaaatcctctatgaagctgttatggatcacctgtaagaaaggagttttactatggatttagcaggcaaacacattggtctggccataaccggatcattctgtaccttttcaaaaatagaacaggaaataaaacgtcttattgaaacaggggctattctccaccccattttctccgatcacgttcagactacggattcccgtttcggggataccggagagtttatccggagagtatctgaaatgaccggaaatgcaccgattttaaaaatcgaagaggcagaacccatcggtcccaaagggtatctggatgttcttctcattgccccatgcaccggcaacacgctggcaaaactggcttccggcattacggacactcccgtgctcatggcggcaaaagcccatctgcgcaatggaaaaccgctggtcatttccgtctccacaaacgatgcactgggaatgaactttaaaaatatcggcgagctgtttcacaccaaaaacatcttcttcgttccgtttggtcaggacgatccggttaaaaagccgtcctccatgatcgcgcgtaccgaactgattgaagatacgcttcgggaagcgctggagaacaggcagatacagccggttataaggggagtataacgcttccggatcacagcatgaccgatccgggcagatcaatgaggccgaaaagtgatgggatcatcatcacctttcggcctcatctttctgaatgacttaacttcgctcaccaggggaactgtattttttatatcccggatgtcttccggtcacgtgatagccttcccgcatggagagcaggctgtcaatatgatccctcctgctcattccggccggtgtagccagaaacgttccagccggcagttttaccggttcctcctccggtccaccgtccggttcagcttttccgacatcacaagcaggagaaccgtcaggatcagtatgtagaaaggaaggctgctgatatttgtaatggaggcaaggactccgaacagcggcggcataaatgtcgttccgatataggcgctggccatctgaacacctatgacagcctgggaattttcccgtccaaagttatagggagtcgcatggatgatcgccggatatacaggggcacagccgaacccaatcaccaccagaccggcaagcaccagcatgttggtttttaccggagccgccacgagaatcagtcccaccacaatcgtggcaataccgatgcggatcagcccccggtctccaagccagtcggctgcaaacccgcctaaaaagcgtccaaaggtaatgccgaagaaaaacagtgaggagtatcccgctgccagattcacatccattccccgaacctgcaccatatagctgcttgcccagagcatcatcgtctgctccacggcacagtaggaaaaaaatgctgccatcaccaagggaacaccctttaatcttatggtctgcaataggctgagtgtcttcccggaagagggattctccgagatccgtttttcttctttcaccgctgcagcgttccgggcgccgtctcccttttctctgttggcctgtttccagaggggcaggctgatgaaaagtccggctgtcagaacgaactggatgatggaaaccgcacggtaaccgctgtgccagccataaccgccggtcaggcagtatctcatgatataaggactggccgcggcgcccagcccccagaagcagtgcagccagctcatatggcgtgaggcatagtgaagcgctacgtagttattcagtgccgcgtccaccgctcccgcaccaagcccgtacggaactgcccacaggcacaaaagaagaaaggaaccggatactgagaaaccgaataaagcgaccgccgtcatcagcacactgaccgccgtcaccaggccagctccaagctttttcgtaagacggtcggaaagaaggctggaaataacggtaccagccgcaatcaccatcgtgatcatccctgcataggaaacgggcacattcagctccgtgtgcataacaggccaggccgaacctaccagggaatccggaaggcccagactgataaaggccatataaataataacaagtaaaaatgaatacataatctccccttctgccgtactctatgatatcaaacccatgcagcgtcccatcacctcaagcatctgatccacctgaatcggcttcgacagatgaccgttcatgccgctggccagcgattttttcgtatcctcgtcaaaggcgtttgccgtcagggcgatgatgggaattgtgcgggcatccggatgtccggaggtccggattcgtctggctgattccagtccatccatgacaggcatgcggatatccatcaaaaccacatcaaaccagccaggctctttcccgcagtacagatcaagtgcttcctgcccatccaccgcacaggtcacggtgaaaccgttcatctccagaatggtctgcgcaatctcccggttcagttcattatcctcggccagcagaacacgccgtcccttaaaatcaggaatactggcctcctgttccgctgacggactttcttctgtattctcgcaggcatattccagactcagggtaaagaagaactccgatccctgatccggttcgctgcgcacctccagcgtgcctcccatcatctgcaccaggcggctggatatggacagtcccagtccagtgcctccatggcgtgaggcagtgagtgcatccgcctgctcgaaggcattgaagattctccgcaatgcggccggctcgatgccgattcccgtatccgtgacggaaaaacggatcaatgccctgggctcttcctccagcacattcgcagagactgcaacgcggccggtctccgtaaatttgatagcatttccaataatattaaccagaatctggttcagccgcagactgtctgcccgcagaagcctttttttcctgtaatcattgtcaaaggtcagaaccaggttcttcgcctcggcctgggcgcggaataaggactccagattggagagctgctgttccaaatccatcgcttcatagtttagctccattttgccgctctcaatccgggacatatcgagaatatcattaatcagttccagcaaataggtattggctgattcaatcttctccaggcagtccagcgtcttctcccggtcatccagcacgctcttggcgatcatggtcataccgcttatggcattcattggagtgcggatctcgtgggacatgcgggacaggaaatccgtttttgcctggctcactgcatccgcctttgatttcataataaaagaggggactatcttcaccagttctttcaacagcttccgctgttccccggtccactgataattctcctgatcgatctcaaagctcatggaacccacatattccccataattccagatcgcggcatgaagacaggaggcaatatgggagattccgtccctcacgttatggtcggccaggccatcctcatcatacatattggcgcagatttcaaaatcttcctccgaagcatagaaatcctgtcccagctgcagatccgcgtggtggcgcgcccactgataggaaaaatggtaggacagaaaagctttgtccgcctcaataatcgacacccggtcgaaatggtacttctttccaatacaggaaagcagcaggaacacggcgtcgttgatatttttcgaccgtcccaaaagctccagcgcaaaggaaaccagatccttttccggatgcagtatctcccggtcaaccgtgtttacctggaattcctccgggtacatctgcgtaaggaacacccctacctctctggaggtgtcgagatagcaggcagcattgcctctgccgtgatccttaacgtattttaaggtgctctcggcacagcagtagagcgcattgtattcgtctgtcacttcggtgctgcacattccgatgctggctgcaacctgaatgtctttttccgtgttgagaataatatttcttatcatggcggctatgcgcgggccgatgatgccagcctcccgtttgttgcagttttttaggaaaagcataaattcatctccgcccaggcgaatcggaatgctctccttttccgttatctgccggagaacatccgctacctcctgcagaaccgcatctgcaaagacattgccctccttctggttgatatcctcaaaatcatccatgtccagaagcatcatgacgccgtgttctcccggcaccctttcacaggcaaggtactcctgaatcatgcggattccgctctccttgttgtaaaggccggtcaggctgtcacgggacctggcctcctccaaagccacctccatctccttctcccgggttatgtcttccacaataccaatgacaaactgcgggtttccttcttcatcactgagaatgacggacatggtctgacggctccagtaactgcggctttttccgcggaattcgcaggtggcggttctctctccgctgtgaatctgatcgtacatcgcatagaaagccggataatacgcttcatctacctcttcctctgcaaacccaaacggcatgttgtcataccggttccggcagtgatagactttacaggtccgttccgggacctgacattcgccggtctgcggatagtagtaaaactcacaggtcatcgtatgctcaagggcccgatggatgatctcattactggcctccacctgtcttgtaaggcgctgttcgttcaattctgccctcttccgctcattgatatcgataaaaacgctctgaatgatctgttccccgtcactgtccagaaggacctcggccgtaccgatgatccagcagggaagcctatccttcctgagcagacggtactcaaaatcagatttatctccattctcgcgcagtgtcccaatctcttttaaaatgctctccctgtcttcctccgcgatcagcaggggcatattccagtcctttttctgccagaattcttccggttcatagccaaatatacggatcgcctcacggttggcatttttaaacacaactcccatgtctgttaagcggtactgtacaatgccgcaaagcattgactggaacagatggtcgtactgttttgcctgcctcgcctgctcttctgcctggcatttcaaatgctctctcgcttccacttctcctgaaacatccctgaccacacagatgcagactgcccggccatctacagactctcctctttttcccagggcgctgacccagatatagcttccgtctttctttaagatccggcagtaatccgtataatcactgctctcatcaagtgcttcctcgaaaatatgtaccgcagcttcccggtcatccggatgcacacagtttataatcatgccctctgtcgcattcacaaattcgtcataggaatagcccagatatgacagcataaaatcattgatatagtaaagagggagccctggctccaggtagccgcccataattccgccgggaatacttttccccatgatatccagcgcctttgttccaagctgacgttccagctcataccggtccagcgtggattccggaaaatattcgccctcctcctgtcggctttcaggcgtcgatgcgtgaatcgaagcgattctgcagactccatcctcaccctcaacgcaggcggcgctcacccggaaccagatcgcgtccgcttcgtccccgggcggatatacattagccgtaagaagaacgacggcacaccgatcggaaacaaccatttcatcgaagctgtcatactctattccaaacggttccggcatctgggaaaattctgtagccagtgcctgttttgcctggttccgtcccactgtcagttcagactttccggttcccacccaatgcacggtatctgtcacacagttcagcgtgtcctctgcattccgccgaatcagatatgcatcaaaaaaagaacggaccgttcttccagcttcgcccggttgtatcataattccacctctttctatcctttatctatcacaaaagtttgtttccggcaattcagccctccgcttccagtgcgggggatttttgcttcttttgttaaattataaagcagaacagacaaaaactcaatcaaaaagtcagacaattattcgtaatcaaaaataatcgtcgtttgacagcagacagaaccgtcagctatcagtccagacgccgcgcaatctccctcatatgccttccatccgttccgcagcacccgccaaatattttgagacagcaaatatccttaagcgccatcatatcttccgccagcgcctcaggctcagaggttaccagttctgcagcattatccagttcctcatatgacaactgcgccgtattcgcctgtattcccagaaagcgccgtttcaacagttccttgtcctggaacggctgtgacagcgcctcgtatgcaatccgcggatggacacagtttgtcatataacagaccggcggatcagatacccggttatcgatgtacgtgattgcatcgcaaataggagtcccgtcgatcagcgttccacttctctgaattgtgaagctgacgatataaggaattcctgtttcagccatggcccaggccatcccggccgcctcgggaagcgtcgggatcaaggccgcatagagaaagtcaacgcctgcctcgctaaactgatccagttcccatctgtggaacattctggacttgttttctcccagagcgcctctgcctgtatatgcgtctccccggctgccaatcataccgcccgcatacatctctgccctgcattctctttttattctttgaaggaagctgacattatccccaatcacgccctcatccgatctgctccttacacgctcctgattgactctgcgtgtgggcgtcactgccagaaacggaagctggtatctatccgctatggcgccatattccagccagagttctttcagcgcagtccttcctttcaggctgtacacatgcttcgccagagcaaggcttttatccggcatcaggccatattcccgcttcagccgttcacccagagcgccttccatcagaaaggcctgatggtgataaaaagaagttttaaagtccatattatttcctcccgtatttcctgatctgccaaatctggaacccttaccagactattttatttcgtcagaaaaaaatctgcaaacaggcaataaagacaggacaggaatcagttatagattcccggcccatcttcattgcctgcttgatcatttaaacttattctaccatattcttacaaaaagtcaaagccaggtatctctcgtaatcaatgagtgtctctcaatacaccccaaaaaaacgaattaccggggcaacccggctctcgagaatctccagccggatttctttcgtcatgacaggttcaaacaccgcatttttccggtatccgaccgttttcccttcatagagtatgcggctcactccatcgtcaacgctgagaatgcggaacgtttcaatccgctggctgaacctgatctcctccttgattaccaccatggatacgttaaccggttccttccagctcagacgaatctcacagcttctgacgccgtcgggagtcttatagcatccatcatcatccctcctgatattggctgcgacgtaaccaacctgggacccggtggcagtcatctctgcatcttcggccagattatgagcctcacgccttctcaagtatgcccccagttctctcagcctttcagcgtcacgctcatggatcagcccctcttttgtcggcgggatattcagaagcatcgtactgttgcctcccacggaacggtcgtagatggataccagattttccagacttctcacctgatcatcctcagaggcgtgataaaaccagcccggtcttatggaaaaattcacctcggtgggataccacaccagatccgtctctccctccagtacctcccggctccccagatcctggtcgctgctggagagcgtcctctgacgaaactctgtctcatcactctgctggctgttttcctttatcttttccttgtcctgcaaacgggccggcaccacgctccactcctgctccctagtgtctccggcttcgttgccgcaccagcgcacatcagggccgcagacagagatgcaggcgtccggctgcagacgtctgatcacctcatagtaacggtcccagtcgtacctctgaacccttccatcggcgccttcgccgcaggcgccgtcaaaccagacacagaaaatgtctccgtaccctgtcagcaattccgtcagctgtcccacaaagtaatcgtcgtattcgtttccttttccataacatggttcatggcggtcccagggcgacaagtagataccaaactttaacccgtgtgcccggagagcctccgatacctcccacaccacatcgccctttccaccacggaaaggacttgcagccactgtatggtccgtatatttactgggccagaggcagaagccatcgtgatgcttacaggtgagaatcgcacctttcataccggaagacgccagagcgttggcccactggtctgcatcaaacctctccgggcaaaagatcgaaggcgattccgttccgtccccccactccctgtctgtaaacgtatttacagtaaaatggagaaaaccgtaaaattccagcttctgatgatttctctgccgctcggaaggcaccacctcaatcagccttttttcctgttcatcgattaccaataccgttcccaatcctttctcattctcataagtgcctccatatagaagtaatccccccacaggttacactcgtcgactcccgactcatggactccattctcctctgaccgtttggcatacgttccatgaagcagaattccggctcccggcgcaccttctcttaagagacaccggtccgtcaaggccttcatcagtttagcagccatggacgtaagcagttccgccttttcctgatccgcacacctggccatttccaggagaccgcaggcagcaatcgccgcagcggaggaatctctcggttccccgcttccgtcatgaaaatcgaaatcccagtagggaattaaatcagaaggaagatgttccataaaacaggctgtcacaccatcaaagagtctttcatattccggatcgtgaaaatatccataacttaaagtagttccatagatctcccacgcctggcctctggcccagatggagccgtttcggtttccctgctgcgtgattcccttcacaggcgctcccgtctccggatcaaagtagtaggtatggtacgtggaataatcctcccgcaccacacaggccatggccgttctgatatggcgttttgccttctcacggtaaacaggattacccgttacctctgacgcccagaacagaaggggcatattgagcaggcagtcgataatcaaacggtattccttcggatcgcccacagtcccccacgcctggaagaatccgcctttctcctggaatcttcccatcagattgtccgccgccgccagagccgtgcgtctggcctggctgaccgcagcttcctccgcctcttccccctttaacagacgccatgccgccacgcaggacgggctgaataaaaatcccatatcatggtgatccaccacaacccgttccttcatgcgccgttcaaagtctgccactgaagccagcgcctcccgcttaaaagcagggtctttcgtctcctcgtaagaaagccacagctcgccggtccagaatccgtcggtccagtcgtcatttgctgtctttggatagatcccatccacactggccgctgccggaaagctcctgccaaaataagccatattccgctttacagtttccacacagacggcaaaggcctcttctgcctctctgtcatttaactccggcgcagctgacagccagtttttccttacatacaattctttatccatatattctccttacagccggctcacagtcataaaccggacagcctgcagcctgccgtcttccggctgactgcaggctgcttttcattctgtccgttcaagcattccgcccatattcaggcttcaaaccacagaatgtcattcgcctttaagctcatggcctcagcctttccctctccgttgtaaatgactgtctcctgcggctcatacgtattattgacaacgcagtatttgcctgtggccggataataattcacttccacgttgaagttgtcactgtaccacttcttcatctcctgctctctgccggccgcccagaaaatagcgcggtacagcattctggagttctcgaaggaatacggaattccgcttaagtatacgcttcttccctttccaaactcatgaaccgccatctgaacgtcctgaccaatgcttcgtaagatcttcgcatccggaagagcgtagatgttcttcatgccctcgccgaactgaatctcctcactgctgtcctcggtgatgaaatggctgtgggtctcccagttgtacttgtctgtggagaggctgaagcccacttccttatccacgcccaggacactggccagtgcaaaatagcgtccctcgtgctgacaggccgacggctcacccacaccaatgaacccgccgccctctgccacgaattcctttaccgcgcaggaaactgccggattcagccagtagctgccgccgctgggtgccgtatatgcatcgcccacgttgatcactacactgcattcctttaagacagacggattttcgattacatcgtcaaagctgataaatttcacatcaaagggcatgccgctcaaaccttccagtacacccgcgtaagaatacgtctgtttgtaatcaatggcatgggctaccatatgggtgccccaggagcggagttttccccagctgttcaagacacctaccgtgaagtggttatatggagtctggcctcccacattttcatagagcagacggaattcatcacagatttcctcgatatactggataaaatccgggaactgaagcgccagctttaaataaccgccgtaaccgatccggtcgattggcttgcgtaagatggcacgtctggcggtgacccagttgaccttcgcctccctgatcggatctcctccctcataaaatacatccgggaagaaatacggcaggaatctgccttccgtatacttcacacccgggatatcggagataaggcggagtgtggttccgttccctacggagccaaccactgcgtccaggccgacttccttaaaatactccccgaacggttcggttccgatccagtggtcccctaaaaacatcatggcctccctgccgttttcgtggcagatatccactaagaccttcatcagcttcgcaacctcgcgctgctggaacttttgaaaatccttgaattccttagacggaacgcggttcgtgttattgtggtaaccctggtcgatgatatactccggacggaaccggtaccctgcctccttctcaaactgctccaggatataagggcttacactggcactgtaaccgaaccagtctacgaacttttcctttgcatactcgttgaataccagggtaaactggtgaaaaaaggtagtaaaacgcacgacatccgtatccgggttttccaccatccagtttttcagcctgtcaatgacgtgctgctgcgtcttcggctgtctcacgtcaaatgtaatctggtgctccacattttcccagctgttggtaataaaattatacatatgtaccgggtcccagatgatgaaggccaggaagctgaccgtataatcgtggaaacgctccggctgtgccacaataacctctctggccgcctcgtcgtaactccactcatccggcgccactacctctccggtcgtgcggtcaaccacctcccaccagcgtttgatgtcatcgatggtattgggctttaactgctgatcgtataaatgcttcatcaccggaatgcgaagctctcccgcttccatcgccgtgtagaactctgtcatcagatacatctgctgcacttcatccggattggcctctgcccacggattgtcttttcttgtcgtgtagtaggtagagtagatttttaccggcatggactttaattcgtccggcatgctggtgccgtcgcagtcacggagagcatcagctccccagcgttttacgatttctttcgtttcctcaatcatatccacatcagtgggtacggttacccgtccatatttttcactcattgctgcttctcctcataattcgtcgttgttttcagtcattgcctcataccgcttacagtacacgcatatcatactcacggagcaccggttcttttccgttcagctcataagcgttggaatccgcgtggaggcctcttccatcctgacaggttacccggatatacgtctcatctcccgttagcgcaaaggaagcttctgtaaccgtctctcccgggccggccactttcttaaggcagttgcggccttccatcagcacatagattttctccaccggactggttttcacagtcagaacgccgtcttccacatacagctccttaatctccggtcccatagagctgtaaaaactgccctttaagagagcagccacgatgctgtcatacgtcagcttttccgccttaatcatggtaaacccgccaaaggaatcacagagcggatctccgaacggataagagttatgattgtcatccgtggaaacgcagaacagccggttgcccaaacgcagcatctcgtcgtagctctgcgggttatagccatacagcccatcgtgctcacatccgtaattatagatctccattccccagaaaccgcggagattcttgtaatcgtcgtaattttgaagggaccagtaaggatgattgtagcaggcgaaaaatccatacgccttcatctgatcaatatattcattgatatagtggtaatccccatagcggcgctccggaagggggatctgttttttctcttctgagaattcctccggcttcgcatcgtacaaattaatatgatacgtcttcaccctggaaaaatcccccggcacttgaaagtgctcgttgatgtccacctcgcaggcggccagcgccacgaaatgatcatccatcagttccctgtgccactgatacttccggtgatccgtgtaagctactacggaataccccgcttccatgtatgcctttttaacctcttccggcgttaggcggccatcggaatggatggtatgacagtgaaggtttgccttataaaaggtccctgtttccggtattaaataaattttgtttgacattttatactccctccaggatgtgaaatttctaaatctgcagaattttcttccggtaagcaatccatctccggacaatcaggaagcagatcaccgccgaagccgccgccatcagaaaccagatcacgatggtggcattccatcccagggccaccgacagcgctccgatcccataagtggagacggcgccgcctgcatagaccgaggaatttaagaggcccgatacggaagaagctcttccgatcacgccgaaatacgacggaagcaccgcaatcagcatggtgttgaccgccatcatcgccgtcgtcgccacagccagcatcagaaaggataccgccatgctctgccccgacgtgagccgcagcatcaggatggccgctgcgctgaccacgaaaaatgctcccgcagtccgcacctcatcccggaaccagtgaatattggcaaacgatgccagatagactcccagcaggttgaaaaccggaatcaccatggtgctggtaatggccagaatggcactcacgccataagtctcactgatataagtcggcacccatgtggtaactccgtcctttaatgccccctggacgaagagagccatcatcagaaaaagaaagcccgactggatcagaaggctcttccagctgacggacgcattcacggaagctgccgcaaaaggtttcttctctgccgccccgtccggcctgtccgaggtcccggcttccccggattccaccgcgtaccgctccacccggttcatgcccaggagccagaatgctgagaccgccagcagcgccgagcccgccagaacgaacatggccctccagcccgacagccatatcacaagcgccgtcaggccgtaggccgccatggttcccacctggacggagctgttgagagatacgcatgccttcatcctcgtctccgtctcataatactcatacatcagccggatcatgggcgaccagataaacgcctgaaccagaccgtttacacaccagaccgccgccatcagccccggggctttcacccctgccatagccaggttgcagagacctgacaccagaagtccggtgaagaccattttcttcggcgccaggcggtctcctaagaagccgctgacgaactgccccgctccataggcaaaaaagaatgcagttccgatcattccggcctggcccttggaaaatccctccgatgtaatgatctctgtcagactggctgaatagttcagccttccaatatatgtagaaaaataaacaatccagcacagccagaacagaagcctcaccatttttttgtctgttatcttgtaaaatcgaagccccacgccgctgacctattcccttcttttttttcctaaccctttaccgcagaggaattgacgccctccacgaaatatttctgcgagaataagaacagcaccaggaccggcatcagaaccagcgtcgccgcagacatctgaagcgccggatccgtcaccgtaccttccgtaaacagcttaataccgacagacagcatctgcttctccaggctggagatgaagatgtaaggccccatataatcgttccaggaccatacgaatgtaaacagaattaacgtcacgatggacggctttgccaacggcagtataatccttgagtagatcctgaagtggttgcagccgtcgatgcgggccgcctcactgatctcctccggaatgccgatgaatgcctgacgcatcatgaatacaaagtagatatcgaaggtagccggcagtaccagagaccacatggtatccagaatatggatctgcttaaatataacatacctcggaatcagcataatgtcactgggaatcatcaaagaagtcaggagaaccaggaaaattccgtctcttcctttaaagttgatcttggaaaacgcgtaagccgtgatggaaaccacgaaaaccttaatgacaatggtggtaaccgtcatcacgatggtattaatgtaccactgcccgaaatcatagtacgggtcaccgaacaaatccgaatagttggacaggatgatctgatcgggaatcagctgaagcggcttcgtgagcacgtcacccgatatcttgaaggacgatgacaccatgaataaaaacgggtagatgcagacaaggccgatggcaatcagaacaatcgtccagccccatgacatctttttatctttcttaagcatagttcttcctccttaatagttgacccatttttgctgtccgcgccactggatcagagtgatgatcagaacgatgataaacatcacgagagcctgggcactggcgtagcctgtctggtagttggtaaatgcggtacggataatattgatggacataaccgtggtagcctgtcccgggccgcctccggtcagagcctggatggtggtaaagttctgcagggatgtgatcaccgaactgatcattaagaaaaatgtggtcggtgaaatcatcgggatcacaatattcttaattctctgccacttgctggccccgtcgatctgagcggcctctaataaatccgcagagacgttctgaagcgctgctaaatacgtaataaagttaagtccgatgcctttccacacggcgatgcagacaaccgtcggaagcgcagtattaagaccgtacagcagatacggcggattctcgctgccgagggcagacagaatgtagacaaccggaccgtccggaccgagcagcagcttgaatacaacagccaccgccaccatattggatacgtagggaaggaagaacatggaacggaccagattcttacagtggattcccttatttaccatgtatgcgatgaaaaagccgcataccatgattaacggcacatacatcagggagtaaagcccggtacggcctaatgccttcatggtatccacatccgaaaacatgcggacaaaattgctgagccccacaaaggacgcgtcttccagcttgctgatatagcggacattggtaaaaccaagaatcaccgcaatcagaaacggcagcccctggaatataatgtagccgatcaggtacggagcaataaaaagggcccccgtaagattctcctttttctgagcaatggaggatttcattttcacttttgcattaccattacttttcataaatacacctcttttttcgtgtaaatgcggttgagtgagcgcaaaaagggcagcccctaaggtttcccgaatggactgcccgtcaggtcagactacattactgcttatcttcttcgatcgctctgtttgccttatcctgaatcttggtcactgcgtcatcgatgctctcagctccctggccgtaaagctggccttcttcgataatagcctgggagatcgctgcgtcgccgtagccaatgattttttcagaaagtgccttgcggccgctgtcaaaccatgctgtcttgaagtcttctacagtgagtccgtcaaattcaaatggcttggccagtgagttctccacgtactcattgatttcttcgtctgtcaagtcgattcttgcaggtacacggcccatgcccagtgtatactggttctcagccatgcaggctgccgctgcgaatgccgcgtctttgttcttgctggtggacggtactgcgtagcagcccggcactgtcagtgtggacggatcggttccctccggataaggcatcggaagcaggccgaccttccagtctctcgggtacttgtcaaactgatttaagatggaagttacccagccgccgcacataaacataccgtattttccggtcgatgcaaatgcgttccacggtgtgttggaagccttgaattccagaatcgaaggctgaatcttttctgtgttgcccaggccgtagaagaactctaagctctctttaaacagcggatcgtcaaagttggctgttccgtcggccttatatggctcccagcccttctgtaatgcgtacatatagttgtagcagtcatagtccagcattaaagaaccgtagattcccttggaggtatctgttaccttctttgctgtttcgatgtatttttcccatgtccagccgtctgctgtcgggtagtcaacccctgcgtcatcgaagatctgcttgttgtataacgtgatccagatatcagaaaatgccggaaggccgtatacgtctccgtcaaactccggaacgtaatcgccaaaggttcctgcgatatcgtagcccgctttctcagcgagagcgttcatcggctctaagacaccggcattgtagaatgcctttaagcccggctttgtattgtagattaagtcgatctcatcaccagccattaagctgaccagggttttgtccacttcaccggctttcgtattcggaatcacgtagaattcaatattgatgcctgttttttccttcaccagatcaagtaacttctggttttcttctccggtactggccgtctgtgtggttgcatactttaaggtaacaccctcgaacggcttgtcggaagccgccgcaccttctgttgtctcaccctctgctgcggtttcgccctctgcttttgtggtggtttctgctgctgcggttgtggctgtatccgccggttccgccttttttgaagagcagccagccagtgatcctactgccattgctgcgcagagtgacagggaaacaacgcgttttatgtttcttttcattgtggtaattcctcccagctaatttatttgatgtattaattgtaacgtgaaaaccagccggcatccatagttggaattttacctttattggttattcttgtcctttaccgatcgtttgggaatcgttatgatcacgatcgttccggccccctgtttactcaaaatccgaacactgttctggtaaccggtatagatggcgattcgttccttcacgctgtacagaccaataccagtcccttttcgtctccgttttccgggctccgtctcggttctcaccgtccccgcctcgacctggcggcgcacctccttcagctggttcttcgtcatgccgcatccgttatccgccacacggaaccggatcacctctgactcctcccggatatcaagccggatcttcagcacacggtcgatcccctccataccgtacatgaagcagttttccaccaccggctgcagggtaagcttaatcatggcatagttatacagctgatcgtaatcgacggtgctgtcgaattctatccgctccttatagcggtttttctggatattcacataggccatgacgtgttccacctcctgccggatgggaacgatagtctccccgtttccgatggacaggcggtacagacgccccagcgccgcagcgatccgcccgatgtcggggcggcctacttcattggacttccagacgatattttccagtgtgttgtagagaaaatgggggttgatctgccccataagcacctccagctccagttcctttttcttcttctcactctccacctgttctttgatatagtggttaatctgcaccagcatggcgttgtaatacatcatcatgctccttaactccccctggtatgcctccggttccacataggcctccagattgccgtcatagacctccttcatagaagcgtccagcacctccaccggctgaaggaaacgcctggagatccagttaatgatcgcgatgcaggccgtcacgcagaccagcatggcggcaataatttccttaaacaggcggtcgatgggctcggtggccgcgcttaagggaaccacggtaaatatctgccagtccgcgttgtttaacgggctcaaatccgtaatataagactcatcgtcatattgaatctgatggctcccctcttccgcttcttttgcaagctccataatccgctccggcatccggcacatctcgacgacctcctgatccgacgaagacacgagacggccgccggaatccacgatatatacggtccccttcatctcctcggcagatgcctgataaagctggtagatctgattttcctccagcacaaagaactgggtatagagccacgtaccggtaaacgggtgcagaatccggcgcatacaggtaatcacctggtccgttctcacatccccctttttcgtcctgctgaggaaattattctgcaggggctgccagtgaaacatggacagcttcgtccggtccgtggcgcccatgccgaccatgatccgtttgagatcatttccctggaaatacgggtccaggaaattatacacttccttgttatttccgtagatggcgctgattcgctggctttttcccagcgggtcagtcttcaaaaagtagttattgagttcatagatatcccgctgcttttcgatggtcctgctgccgtaatcctttcccaggaactcctccacctccacgtcgtaggcaaatttgtcggataccagctgtacattatagagcagctcatccacctgggccgcgatggcatcggctctctggcgtatatttccgactgcctggtttttcatctccgtccgtgtctttataaacagcacagacgcaaccaccgtaaagggcagaagcaccccaaccaccagatagaaaaacagctgctgtctcaatccgcggttcatgtagctgctgagccgtttccatatgtttctcattctgtctgtcctttccgtcagttatggagtccccggtattcatttggactcatgccgcagtgctttttaaacactttgataaaattagaggcatctgcgtatccggtcatctcggcaatctcataaatttttaatgacatgtcccgcagcagcagcttgctgtgcgccatccgcttctgtgtaatataatcgctgaaattaaatcctgtttcttttttaaatactttcgatatgtaggccggatttttccggaaatgctctgccgtggcctctaaggagaccagattggaacagtattcccggtctaaatactcccgtatggaggtcaccagcagtcctgtcttcttctggcccgctgacaggtccggcgcgatggaagagacgtgcttcaccgtctgcccgtagacggcaggcagatgttcctcgtcgtcacagagaccgcttaagccggccagaaggcccagtccgtagatatctccgatctctccctggatctctctgatacagcggcctatggcttccagctcctcggctttgccttccttcagcgtgataatccccaccaccttccggtcacggtttaagaaaaaatgtttctcccaggccatctctctgctgttgcagtaccggataatcctctgcttcagctggtagtgatcgtccctctcccctgatcccacaggctgagcatccagtaccgccatcatacagcagttgaacttcatgccggcgtcttccatctcctctttccagccatactcttcctctccgcccacgtaaccgtccaggagattgcttaaaacacgcgcataagacagttctttattctgcatggccgagacctttaaagactccagttcccgccgtttcatcccctcttcatccagtttcgttttcagacggtgaaacagcgtctcgaattcatcaatgtctgtaggctttaacagatactctgtgacctggttgcgtatggccatatttaaatactccacatcgttatatccgctgagtatgataatcttgatctccgggttattttcatggagatactgcatcagctcgattccatccatctttggcattcggatatcagacagaaccacgtccggatgcgtttccccgatcatgcgcacagcctcttccccgttctccgcctgtcctgcgacttcaaatccccactccttccacggaattccccgggccatgccgcggcggatatcttcctcatcgtctactatcagtaactggtacatggctgttcctccttgtcgtattttgcagctgcctttaactgttctgcggccgcttctgtcacttattgtataacttctttgggtttctgacaataaaaaacagttcaatccaaaaaaatgagactgaaaccggcagtcctgcacggtctcaatctcataattgctgctgtgataaacgcttttttcgccctttttgccgcttctatacgtcttttccggcagcggcaagatagcgctcagctttttcttccggcagggtttcaatgccggtaatctggccggacgaattccttgtaaccgccagatcagcggttcccgtttcatctgtccagaaggctggataccagccgtcgctttcatcaacaaacactcttaccttctgccctttaaagtacatggcgtcctcttccgcgcgaaacgatattccgaaagaagcgtactgctcatatttttttccgttttccagcggctcctgatttgacccgtctgtgtcctcttcaaaaaatttggcacggcatttctgtgcctccttctcggacatcacgctgacaccgatgacggctccggaggaatcacgttccactttcagattcaccgttccggcctcatcataataaaatgcttccttctcattagaatctgtaaaaagctttactttctggtttttatagaggagcgactgaccatcgcctgatataccaatttcatacggggaatattgttcataaataccggggtccggcagaaatctgactgcgatatcttctttcacgtatatgagatcctgtatgctctctgcagcagcggaggtggcaaacgcgctgccaatcacagccactacggcacaggccgccgctatggagaaaaccgttgtcttttttattttcataattgcttcgatcctttcttcaaccgcgtttttactgaaattgctgcacagcggagtaaggccgcttttcttttcctccatggcaatcagcattaacgcataggcagatttgacagtttcaccgaacatccgcacgactctttcatcacaggaaagctcgatatcccgattggccaacagatacatgacccagaccagggggttacaccagtgcaggcacagggcagccgtcagcagcagcttcgtcactgcgtcaaagcgccggatatgcacatactcgtgtgcaaggacgtactgcattctcattgtctccgtccagtccgtctctgccggcattaaaataacaggatgcaggattccataggtaagaggggctgttattttgccgctctggcgaatggaaacagggcgccttaactgatattccgtcagccattgaattgtaaaatcgttttctaccggctcagaaaccataaatttacggcggcatctgatgcaggcagcggtaaaatacaggatgcacagtaccagcccgatcccccaggtccagccccacacggaaatcccggcagacactgccgtattatgtgcagccgcggttccggctgaaaccggatcaacgggcaatacattcgcaatcggagaggttccgatttgtccggctccggaatgccctgccagggagtagacactgaatggggagggcagcgagaacggcaccagcagccgtaccagaaccagcccccacaaaacagcaaacgtttttttcggcagacggttgatggagatggcccggacggctgtgataaccaaaatcatgactgcaccggaaacactcatttgtatcagactcatttcccgtcaccccctaattcctctaccatctgtttcagtttttccacctgctccgcactcagattttttctgcccagcagagaggcaaacagcttatccacggagccatcgaataccttatgaagcagttcatcggtttcctgctcctgcacctcttcctgcttcaccagtgcatgacagacaaagttgggatcgatccgttccacagcgccttttttgatacagcgctttaacagtgtataggtggtattgacattccagttgtaccgcttcttcatcacgtcggcaacgtgctttgccatggtgtctccctctttccagagaacatccataacctttatttcactgtctaccagtttgatgtccatttgtttcacctcttttcttttataagactggagtagtatccatacctatatactactccagtcttataaaaatgtcaatactacaattgtcttatttttattcagatacaatgaccggtatgtctggtgtaaagcaaaaagagagagccgcagccgtcagcagttctctcctctttcactgttgcggcaggggtctgccgcttctctctattttttttcaatgatctcaaggttcacgccatccggatcatgaataaagaaaaagcgggtaccgggattcggctggaccggtccgcggacaatttccactcccagttctttcatgtgttccagcgcctcgtccagattttccacggaaagccccagcgacgggcattctccatataggaacggctcggcatctgcgctgcagattaactcgatctctgccggaccatctgccataaacgcaatttccgtgcgggggccggccggaaatctgcgggccagtttcattccggttaccgtctcataaaagcggatagattcctccagattctttacgtgcagtgttgcaaatataaatttcatgttaatttcctccaaatataaattatgttaaaatcaacggcagacacattttcgaagtgcagccagaaggcggtcaaaatcgatcggcttcgtaacgtgatcgttcattcccgaagccagtactttcgagatatcttccgcaaatgcattggcagtcagtgcaatgatgggaacggtcttcgcctccgggtgaccgctgccgcggatctctccggccgccgtatatccatccatcaccggcatctgtaaatccatgaggattgcgtcgtacgttcccggctcagagctgacaaacatctgaaacgcctcatacccgttctctgccttgtcaacgataaagcccgcatcccgcagaagcgtctccgcgatttccatattgagttcattatcttctaccagaagaagccgcagtccctggagacaggcatccagctttcgtccgagattaccggttaccgcccgctgtactgcctcctctttttcttcttcctccagaatcctaatgttcagcgtaacgataaagcggcttccctctccctctctgctttccacccggatattgccctgcatggctctcacgattccataggagatggacatcccaaggccggtgccctgtacctttctcacgtgacagttgtcttccctggcaaacggaacaaagatatgatccataaaatccctgctgatcccgattccattgtcctcaaccgtaaatacaaagcagccgacgcctggaattcccgatgtcatctccctggaagcaaccgtaatcgtccctccgtggggggtatattttatggcattgttaatgagattgatcaggacctggcggatcttgccggcatctcccaaaaggttgtcgtgtgtggtgccatccgtcaggaaattcagagtctgttccttttccatcgattcattatagacgatgctgccgatctcgtggaacaggttttttaaggaaaacggcgcttctgttaatgtgagctgtcctctctcgatcttcgacatgtccagaacctcattaatcagatgaagcagatggctgctggacagactgatcttctggaggcagtccttcacgcgttcccggtcatccacctgccccatggcgatcgccgtcataccgatgatggcattcatcggcgtcctgatatcatgcgacatctgtgccatgaaattacttttagcctcattggcgtttcgtgcttcctcatacgccgcaaaaagcgctttctggctctgtgcctcctgttccttttccttctcaatattatgggaggctaaaataatcttgattggaaccccgttcctgctctccgccagaatcacgtggacccgcatccagccgtaataaccgctgtaatccctgcggtattccaggtcatagatcgtttccccttcctgaatccgctccttaatagcccccagggacatttcctgctgaaaccgtttccggtcctcctcatgaatcagatgctcgtggtaaatatcaaacaacacgcagtattgatccgaatgattcaggcgctctgcgacatcttcccgcacaacaaaggtctgaaaagtctcttctgccaggtctacatagaagacagagtggtagaaagcggaaagtcccttaatgatattctgagcctcgacgtacagcttcttttgctgctcttccttcagctccgtcagcttctgctcgttgatgtccatgttggcaaaaatcacctttgtgataacgccgtcctgaatttccgctatgctgaacctggagcggacccatcggatacaatccggatagatccggcggaaatcaacttcatacacaggctgttcggccgagagcgtctgacgcaggaaatcaatgctggcggctctgcgcattttctcctgatcttcgggataaacgtagtattttacaaacttctcataatagacatcgagggctcccttgggaaacgccttgtttttctgaataaaatcctcctgccagatcggttcttccgtattgtttacatagtcaaacagatagatggaatagtagcattcacacagatttgacaggatggcctcccgtctctgaatctcatacttatcatccacattccgcaccgtaagaaggatcctgtcctcaaaattctgactgatcagggcagaataatagctgtaggcatggaaaccgccctcccggtcgtacatatgcagcataccttcccggtatgcaccggcagcatagttttccgtatcaaaaatgcgttcaaattccaaccggtcctcttccggcataatcgttaccgcctgatcatggaattcctgatacgtgccccttctggaaagagtcagcagttccccggaatagtaaatacagttatactctgttttttcacagtccacactgatgagcagtgtataaatctgtgacactgcaacctgtgcgctggcttcgtcaatccacttttctatctcgccgtcctgctcttccatggcggctataacccagggatattcctcggagtattgatttaagggaaccactttgattctgcgccagcgtttttcttttgtcctgtaaatcgcttccgctcccgtatgatcgggatcagctctgccggtgccggaacagtccgcttgaaactgtcttcttatattctccggattgaccgcattcataaacagttcgcagttctgccatacaatctcgctttccgcatagtttcgaaaaaaagtctcgaaatccgctgcgccttcgctgaaggcttccagcttctcggtggcttttataattctgtattcaccggtttggagattgcaaaggataatccctttataattctcattcagcttctccaatatggtatcatactcctgcttcagcataaccgtattggtaatattctggtgatacccaagcagacaggtccctctctgaaaattcttgtcccggatgccgccgcagcgtacatatatctgtccccacagcgggtgatgccacaggtactccacctccgctctctcatcggcgcagatacgctggactccgttctgaaccatgggataataatccggatcgatgcgctcataccacccgcggtaacactcctccggagacggctccccggcaaagccaagcagctccagcatgactttgtccgcatacattcgcggttcctttccctcttccagttcgatcgcccacagaccggtctgggcctcatgcaaaatatcctgaatcttctgtatatccttaaaatgttccgccatctgtcttttcctcccgtatcaaagagtacaccagctattctgccgtatccggtcccttggactttatatcattttatcaaatgcgacattttattacaaccagtttacgcttacaaatgtacgaaaaaaagtacattatctgaaaaagattcgacagatccccgttttatcgatataattagaacagtcaatagaatatctgaacgaggtgattttatggaagtaaaggaatggagctatgaagattttccggaatttgcagaagaggtggagggagcggtaaagattccgaccaccggtaacgaaattggcgtgatttatcaccataatgtagaatatgcagaaattgacggtgaaaagctgcatttacagattttgcgcccactgactcgtaaccagccggacatggtttgtccgtgtgtagtatttgtacagggctccgcatggtttaagcaggacgtctatgcacagcttccgcgagtggcaaagcttgcagaacgtggttatgcagtggctgtggtggaatatcgccattcgggtatcgcaccttttccggcacaaattatggatgccagaaatgccgtacgctttctgcgtgtgcatgcggaagaatacaggatcgcccctgaaaaaatcgttattgcaggcgactcttccggcgggcacactgccatgtttgccggcatgattcacgatgatgtggaaaatacgctcttcccgggcatttctgcggaggttaagggcatcataaatctctacggaagctgcagcgtcatgaaggaagattccaatccgacccagcttctccactgccagccggacagtccggaaggtatggtgatggggcatacggacctgcgtgaaagtgaggagctgcgccgcaggctttcggtggaatgcagcatagagccagacagtgtgatcccgccaacgatcatattccatggtacaaaagaccgcattgtcaactgtgaaggcagcgtgattctttatcgccgtatgaaagagtgcgggaaggatgtgaagctgtatctgattgagggcgccgaccacggcggcaatgaattctggacgaaacaggttgtggacatcatggatgacttcatccagagggtaatataataattgattttcatactggacgtcaaaagaagaacctataccagagcagagtatgcaaaaatgtatactctgctctttcccactctttatacctccgccgctttctgaaatactttcctgtccctgactctgtcgtctttcgctacctgcagggcccttaccgcatttaggatggcaatcacagaaacgcctacatctgcaaataccgccgcccacatactggcaaatccagccgctcccaggatcagcacgattgccttgatccccagggcaaatacgatattctgccgaacgattcgcagggtttttctggaaatcctcatggccgcagcgatcttggacggctcatccgtcataatgaccacatcggccgcctcgatggccgcgtcagagccgagtccgcccatggcaatgccgatatccgcgcgggcaagaaccggagcgtcattaatgccgtctcccacaaatgccagtttacccttcccgctggtctgggacagcagctgctccatatggcttactttatccgccggaagaagttctgtatacacttcatccaggcccagccgctgtgctacattttcgcccacggcctttgcgtcgcccgtcagcatgacggtcttccggattcccgactgtttcagttcccggatcgcaaaggccgcatcctcctttacttcatcttcaatcaggatggctcccctgctgattccgtcctctgccacgtagacaaccgtccctgtctctctcaccagtttgaatttgatgtgatttagattcatcagcctgctgttgccagccagtactgtctttccgtctaaggatatggagattccatggccggcaatctcctgaacatcagccactctggaggcattcagttcctttccacaggcttttacaatggatttggagatcggatggttggaatccttttccgcgtaagcggccagctccaaaagcttctccttcgtaatcttttccggaaagcacccgctgactgcaaacgacccctttgtcagcgtccccgtcttatcaaaaacaaccgtctctgttttagcaagcgcttctaagtagttgctgcctttgatcagaacgccgcatttggaagcaccgccgattccgccgaagaaactgagcggtacagagataaccagcgcacagggacatgaaataaccaggaaggtcagcgccctctcaatccagaccgcgaacggctgtcctgtcagaagcggaggaatgactgcaagaagcaccgccgcagctacaacagccggcgtataatatcttgcaaatctggtgataaatgcctcggatttcgacttcttgctgctggcattttccaccagatcgagaattttggccacggtggattctccatatggtttcgataccaggatttttaaggtaccgctctggttgatacagccgcttatcacatcggctcccggttccacctcccttggcagggattccccggttaaggccgaggtattcagggcagaacggccttccagaatggttccgtcgagcggtacccgctcgcccggctttaccacaatcacttcaccgacagccacctcatcgggatcgacggacacgatcccgtcttctctcaccacatttgcgtaatccggccggatatccatcagcccggatatggaccggcgcgacttgctgaccgcgtaggactggaacagttcacccacctggtagaacagcatgaccgcgacgccctccgcatattcgcctaagaacatggcgcccacggtcgctaccgtcatcaaaaagttctcatcgaatacctggccgtgtaaaatattcgtaaccgccttccagatgatatcccagccgatcaccccatagcacagcagaaacccggccagtttccctgttggagttagcggaagggccatggtaatcaggtatatggctgctgccgcgaaaatccggtataactgttttttctgtttttttgtcatgttttttccctcttcgtctgcggcggcaaaaacaggctgtgccgccgcgtttttaatcaatttcattgtctcccggtcttcattgtttccagttgtgtccagtcatgattacatcgtttggacagtgacatccggctcgattttctttatcagcctgacagcttcttctgcaatttcctgaaaccggtcatcggctgcctctaaaaccatcttctggcttagaaaatgaacctccacgtttgtgacaccgtttatcttctttacggctccttcaatctttgaggcacagtgtgcacagtctaaatccatcagtttaaatgttttcttcataatgagtatcccctttcaattttattcatatgaatatttgttcatatgttcatctgtattttacaagaagggagccagctcgtcaatgcttccggtcattttgtgtctgtttggagcaaaacagtgtccttttggagctgtcctgttttcgtttttcgttttagaggcagaatatttttcctaactgtggtacaataaagagaacgatacgaggaggtgacacgatggaggaacttacaaaaccgcgctatcagatctattataacggagaaccgctgccgccgcagattttctctgatctgcatgtgcagtaccgttatggaaaccatgaaaatcccggaagtatggatgtgtataccatatttccgggaatcgaactgatctataatgatttttccatgacctgttgcgatagcagaaagaaagttgaaggcgaactgcttgagattcattactgttataagggacgtgaagaatgccagtggctgtgcggcgactatctctacctcggtgagggtgatttatgtatcacacgcatcgaggaggaaactcccggtctctgctttcccaccggccgttatctggggatcaccattgtgctggatttaggtattttaaaagatcatacgcctcctcttctggacagtgaaagcatgaggctgcaggatttcggagacagattctgccccggcaatcactttctggcaatccgggccaaccggcagatcgaccatatatttggagagctgtatcagattcctcaggaattccgccatgactacttcaggatcaaagtcctggaactcctcctgttccttcgcatgatcgacccggaacaggaacgcgctctggaccgtgtcaccaggaatcagattgatatcatccggcaggtacggcgcaggattacgcagaatcttcaggaaaatataaccattgatcagctggccagagaatactgcatcagcccaacctccttaaagagcaactttaaacaggtttacagcacgaccatcaaggactacttgaggaaagtgcgcatggaacgggcttccgccctgcttctgaccacagacagtaccgtagccgatattgcggcttcgctgggttatacgaatcaaagtaaattttccgccgcgtttaagaccgtttatgggctggcaccggcagagtatcggaagaagtgccgtcatgagtatatatgtacttcctctcatactcctccagcggcatcggcttcgcgtaataatacccctgaacatagtcacagccgatagctgcgaggaaatccctctgctcctgcgtctctacgccttccacaattaccggtatccccagattcccggccatccggatcacagatgtgagtataatttccccctttccggccagtatgtctccggaaaggaaattcatgtccaccttaagaacatctacatcgatatccttcagcatatttaaagaggagaagccgctgccgaaatcatccatcatagtcacaaaaccggcgcgccgcagcatacggatggcagccatgatctgatctgaatcggaggcataagcactttccgttatttccagattcagcagcgaaaccggaacgcggtatttcttcgtcactttcagcagtatatcgaccagtttcggatcaaggagcgttatccttgaaagatttatggtaatgggatttagttttattccatcactgcaccatttaccaataatccggcacacatgttccgccatgtagtaatccagacggacgatgaaaccacttttctcgaacagcggaataaaggttccaggcgggatcaggccggctttggggtgattccagcgcaccagcgcctcggctccatagtccgtatctgtggcaagatcgaatttaggctggaaataaataataaactgttcctgttccagcgcctgccgcatatcatgcatgatctcagacgcttcgatttcccttccgttctctcctttgtcataaactcccaggcaggaggcaaacatacattcattcatgatacggatcacttccagaccgcttctgaagctggcgcttcctctgctgtttcttataattccctgtatgcttgcattctgtctggaatatatcgtgacggtaaatacattttctccggttttcaggcggtttcgaacagggcaaaacttcaccattcgtccaaccttttcaggatgtgtaatttttttcgttcttctttttgtttttaccggatccatttttaccaggtgacggcattctccgttttcggccggaaccccttcactgtccagaatttcttcgatcagaaacagcatgtgatcaagcccatggaagcagaccggtttttcctcgtagaaagactgcagccaaccgcttatcgtctgatttttgcagttttcaatgataatgatcaataccgctctcatatgatttccttctctcattcgtatgagccgccggataccacggaataactattctgtggtatccgctgtctgaaaaaccacagagaacccttaccatatcttccatttttcttccgtagttcataaaaatggattctatcctgctacacaagcagaccggcaagaaacagagttctctccggtctgtttattgtgggtaaaaccatggatatgtacattgactccccctgtcttttgttgtaaaataaacagagtttcatttatttactttaaataaggcttccggataccacagaatagttattctgtggttattttgtctaaaccgatcctcatccggttcatgactttttcatactgtctcgtgcttgccgccacatagatgcgcgtagtctcgatcgatgaatgacccagaatatctgcaaggtgggccagattcttttcaatggagtagaaggtctttgcaaacagatgtctgaaattatggggaaacacttttgacggatctactctggcttcctcacacagccgcttcagggagtggcagatattgctccggtccagatctctgccgcttctcgtgcggaagatacagccgctttttattttttcgtttctgataaattccttcagctttttaatcaggtttttcggaaagataatcagcctgcatttccccttcatatagatctctgtttttccctggcagactgcctccacggtaacgtatggcagctcactgatcctgattccggtgctgtagagtaccatcatgagataatagagctgtgattttcccattctccctgcgctgtccaaaagtcttcggtaatcctgttccgtcagttcccgctcttcgtcgatataggcctttttctgtaccttcaggaatttcaccttacacatatccagattcataaattccagataggagtgaatggccgaaagcttaccattgacagtccccgctttgtactggctgctgagataacgccggtactgtaagatcgccgccttactgatctcagctttatccatataagcaagcagctgttccacttcatgcaaatacttacgtatggtggcatcggctttttcctcgttcttcagataatcctcatatcgtttgatattccttgcattttccatgacaggcctccatttttccagtcagacgtttataagtgattgtatggcaaagacacctgacgccggaatggcggactgtgcctttagcagcctttttagtttccttattatcagaaaaaactatgcatcagtttaggaacctttatgaaatgttgccttccggctctgtccaaaagaagtattttcagtatgaaaagccggtattgaagtgatgcgttcaataccggcttaatattcctgatacgtaatagttaagactctgatatgtattcccaatcattataatggatacataagtaaaactcaaatcacctcgttcgcatcaaccagagacttctgaagcatttagcgcgaacacttcacagccagcagtttctgtatatcatcaaactgctccctgcatgtaacacgatagtggatccagccaccgtcaccgcagggatacttcgtatcgatatactcccgtgcatagggctgcagctggccatagacagactgaaactgcttgtcagacaatcggatcatcactgtaaaactattattttcagcgaagatattgcacatcagtttctgtttcagcttgtgagcgattccccagccgtactggctgccatatggaaagactattttctgttcagttccaaatgttctggataaccattcgttcagtgaggtaaataccccgccgttttcaccgcaatacgcggtcataacagcaattgttggtacttccttcttattcagcatccgttcgtacatagcggcctccatctgttctgattattgacctgattgtaccatatatcctgcgtgccaacaactccttaattacagaatgagagaaaatccgggcgtcatacaggccgtttatccggaggccagccttttctcaatctctttccagatagcagcaagccgttcctcagcctcccgttccgtgtttccccttgtaccggtataaacctttatcttcggttctgtccccgacggcctgatgcaaaaccagttgtcgtcctccagttcataatacaaaacatcagattttggaagttccatgtgatcacacagatagtcccggactgtcacggttttaaagcctccggcagacgacagcggtcttcttctcatgtcctccatgacagcctgaatctccgccaggccatctgcccccatttttacaatggtatgaagctcctctttgtaatacccgtatttccgatagagattctgcatctgatcccaaagcgtcatccctttcatccggtaatatacggcagcctcacacagagccatgaccgcggctactgcatccttatccctggaatgtgttccaacaaggcagccgtaactctcctcaaagccgaagagatattcatacgtcccctgctcctcaaaaagacgaatctgctcaccgatatatttgaagccggtcagggtctcaaccagcttcactccatattcccggcagaccgcctccgccatctttcctgagacaatggtggtaaccactgcgccgttatccggcagtgtgcctttctcttttctccgctccagaagatattcacagagtatcatccctgacatgttgccggtcaatgccgcgtaccggccggtcttctcatctattacacagactcccagacggtccgcatccgggtcggttgccagtacaagatccgcagctgtctgttccgccagattgagagccatggcaaatgcctgtttatcctcagggttcggtgatttcacggtcggaaaatcgccgtccggctgttcctgttcttcgaccacatataccgattcaaatcccaactctttcaaaatccttctcacaggaagattaccggtgccgtgaagaggtgtatacacaatcgttaattcctttgcccgcagtttcagcagagacggttcctgcacaagttctttgagtttctccagataccggaggtccatctcctctccaatcagatggaaaagacctgctcctgctgcattctcccgctccatggatgcagccgatgaaaagtcggttacagcttttacttcacgcatgatctcagtgtctctcggccatgtgatctgcgccccatccgcccagtataccttatacccgttgtactccggcgggttatggctggcagtcacaacaattcctgccatacagcccagttccctgaccgcaaaggataattccggtgtcggccggagactctcaaacagatagacctcaataccgttggcacagaggcagagagctgcctccatggcatattctgccgaatgatgccgcgaatcataagcgattgccgcccttttttccgtacagttctgacggttcatatagtttgcaagtccctgtgtcgccttccttaccgtatagcggttcatcctgtttagccccgctcccatgattccccggaggccgccggttccaaattcaagttccttataaaaccggtcctttatttcctcctcgctggtgagttctttcacttcccgcctcgtatcctcatcaaaatatgtattgtcgcaccagttccggtactcagccctgtagtcggccatcgttttatctccctgtctaaacacaatattattttacgttaaaagcatcaaccgttcctgtccatcaagacatccgggctccgcgtcaagcgtgtgccagcgaatagatacttcggactgacaggccttccatggatccctgtatcacacggacacgctccacgcctgcgtccatgtcaaaatagttatcggacagaagcagatctccgtccttatttccaagttccacccctttggcaaaggccgacgaccggatgcaaaccatctccccctcctgccatacctccagttgcggatcttcaaattcaaagtgtttgggcggtacaaacaaactgctgccatgggaaaccctacgatcaccgatccacagttcataggaaagataccacctcctcatatccgcctccgtaaattccatctgcggaaagctgcagacagaaagcggttccgcttccacacagtactgtccctgctgatgtatacgggatgaggcatctctaagactccaccggattactccggtgatccgttcccttgtttcattcgtcacacagaaccgtgccgtctttctgattctcctgttctcttcatttacattcatggaagagctcaaagcgccttcctcctcgcaggacagcaaaaccggagcaaaaaaacgttttgcgaaatagtgcagcgccttccaccggccatagtaatcgatggaggaccaggaagccaccggccagcagtcatttaactgccagtagacacagcccatacaccttccccggttccgccggaaatgttccacaccgtaccggatggcctccgcctgaagcagctgggaaacataaaccagaagctccagtgattccggatatagatacatctgactcatatattgaaggatttttccattgtctccggcattcttctgatgcttttccatcacgtaggagaaaatatttctgtcttccggcgcagtaaactgctcaatggtcttcaccgcgggaaatgactggaaaccgaattccgagagatatcggaaataatagttcctgtaatcggtaaatggcaggcctccatgccacacctcccagtaatgaacgtctccccggtccggatcattggggctgtcgaaatctccgcccgatgacggactggacggccagtaaaaagtatccggatcatactgtcttaagagctccggaatgattctctcattcatgattaaatactcggtcttctgcagcggttttctcacccattgattatccgcaaggaacatttccatttcattatttccgcaccacagccccaggcaggcgtgatggcggatacgccgcacattatcacgaatttccgcggttacgttcgcttcgaactccggtgtaaggggatagacggcgcaggcaaacataaaatcctgccacacgatcagtcccagctcatcacagagatcgtagaagaaatcatcaggataatacccgccgccccagacccggattacattaaaattgcagtcccggcagtgctccaaaagcgttcttgtcctctcccggttcacacggcccctgatgcagtcctccggaatataatccgctcccatcgcaaaaatctctacgccgtttacctcatgggcaaacctgcttccatactcatctgctccggtatttactttcatcgttcttaagccgaccattctgctctggatatcctgaatctccccattcgcttttaatacagcctccacccggtaaaggggctggctcccatagccgttcggccaccagagttccggattgtcaatcactatccccccgaaaaatccgtcgtttttgcgctgcagttgggaaaccgacgtatctcccttcggaccggttactttaagttcacaggtacagaccgtatcacagactgactccacggcgatgtcacaggagagagataccgctccctccctgtgaatttgccggatccacacatcacgaatctccgcctgttccacgccaaccagagaaacagcccgaaacagccctgcatccggcagtctgggcccccagtcccagccaaaagaacagtggctctttctcagaagcggaaagccctgcatggcctcgggcgatccgtcatagggggacttctcatacgcctctttgataaaagaaagaggtgaatggaaccgtactctgatcgtattgaccccgccgctttctgctgccagggatttcacaggatattcccatacccggtgcatattatcggcaaatcccagatgatttccgttgaagtaaatatccgccaatgtatcgattccctcgaatttcagcctgatggctctgcagctcatcaattcctcgcaaaacggcagggtggtctcatattcatactccccttccatcatggccagagcatcgtcctcacagtctctccagtatggatcctccattgccccgtgttccagccaggtcccgtacacagttcccggcactttcgtttcaaaacactgtccggtctggcagcttctgactttccagccttccgtcactttctgtatcaccatgattttctccatccttatttttttagaatcacacagcttccaccaggaacctggagttgtttttctccatagttcctgtccattccctccccggtctcttcggaaccagtcagataccggtatccgcattctgccggaacgctcacttcacattcagaaaaattaataacagccagtacgcgttcgccatccagggttctcacaatcttgatcacacctggcgctgtgtattttaaatccatggttccttccgtcaacgccctgatgccgctacggagttcgattaatttcctgacataattccagaccgatgacggatccttcttctgccgtttctcctcctcccagtccatgggattgcgggaagcgtcccgtgatttttcattcagaatccttactgcctcttcccggctcttcccctcccggatcgccgttttgcaggccagtatcccctgaacatcctccgcttcgtccaaagaatttaaaacacggcttttcattccaatttcatcgccataatacagaaacggaattcccttacaaagaagcattaacgtcagcagacatttcgtttcaccgtccgtgaaaccgaaccggtcgggaaaccgtctcatatcgtggcttccgaaaaacagcgtcggatcttcaaaagagccatacattgcctgcatacgcttaagctcctcgtaaatctcctcaggctgaaacgtttccctgctgcccagattaaaattaaatgtcgtatcgagtcctccgtctcccatataggcatgaatcctggacaggtcgtcactgctgatctcccccaccagaaatgcctccggcttcttctccctgattctgtttcccagccgcctgatcaccgcccggactcccggctggttcacatcatgttcatgcagctgttccccgttttctgcagtcggattatcttccagagaactgcacaccgacaggttattgattacatcaaaccggaacccatccacaccctttcgcagccagaaatccagtacctgaccgatggcttcctccacagaaggattctgccagtttaaatccgcctgctctttcgaaaaggaatggtaatagtactggcccgaaccatcactttccacatacgcccaggcgcttcctccgaaaaaggactcccagttgttcggctcccttccgtttacaggatccttccagatataccagtctcttttagaactgtttctcgaagagaccgaatttaagaaccacggatgctgagtcgatgtatggttcaccaccatatcaatgatgactcttatatcaagcttatgggccgctgtcaccatctcttcaaagtctttcatcgttccgtattccgggtcaatcccataataatcggagacatcgtatccgttatccacctttggagagggataaaaaggagtgagccatattccgcccactcccagttctttcagatacggcagtttcgagatgatcccccggaatccgctctccccgttctgaccggcagcgcagaaggattttacatagatttcataaaaaaccgtatttttccaccattgattcatttacgttagctccctcacggaatctctttcaatcagctggacatccagcaccagtttttcgaccttttccctgggccgttccatacattttaacagccgttccattgcctttttccccataaggaccttatctacccgcatcgttgttatacgcggattgaccatattgctcagttcaatatcatcaaagcctacaatactgatatccccgggaactgaaagtccgcattgggacagcgccttgcacatcaggattgccatcttgtcattggagcagatcagtgcttccggcttttcctcgagagcctgatagaacgccgccagtccggccgcatcctgatgaatcactgcgtcctcgacgtctctcaaggcagaataccgtctgatataagcaattccgtcttcaagagatggaaagttgtggcattgctgcatagcctcctgatatccccagaagcgctcacgtatactgggagtataggtcagatctccgaaaaatccgattttccggtaccccttgtccaacagatattttgtcagcttgtaagcgcctgccacattattcgtcatgacacagtcagtaggcgtctccacagattcgtgatccagaagcaaaaccggtattgagtaactcttcagacgctttaaatattcgtcatctatcttacccacgacaatcagccccgataccttctgctgctctacgcaggctggtatctcctgattcttttcaaaggagttgataaacaaatcatagccggcctttttcgccgcctcttccaggcccagcagtatccgtccatagaactgcatgtccttaaagaagcggtcttccagaagaatacagatgtttttgttggagtaagccgccgtatacctggtgctctgatccagatatcccatctcttccgcggcgtttaatacaagtcttctcgtctcttcgctgacgccggcccggtcgtttaatgccagtgacaccgcgtttatggaaaggttcagtctatccgctatctccttcatggtaacccgcttcttcattccgcataccttcctttctgattctgactttatacggccttcatcgcagccaacaattccgaaaccgataaatccgccctgcagattttatcatccgcagcgccgtagtagatcgctatgcggtccccttctaccagacatccgcaggtaaacaccacatttccaaagaatccttccgtctcataggacgcttccggctccaggatcggccgttctgtctttgctatcactttagaaggatcctctgcgtctaagagaaatgctcccagacagtacctgtcattcttatcggcggcatggtaaatctttacccagccctgttctgttttaaacggaaccgctccgcctccgattctcccgttatcccagctgtccgattctgatatcccgcaaaaatgcttctgatgtccccagtgctcaaggtccggggattgggccagccacatctccggattcccgattccgcctggaaccggacggttaaacgccatatacatcccatgaatcttttcaggaaaaattgttacatccttgttttccggtgcaaagataactccatggcgctcatacgtcacaaaattttttgtgctgatcagtgacgtagcagctccgttctccgtaacagacgtataattaatgtaatacgtctctccgatctgagtaattctcggatcctccatcccccagctctcttcttccgcacagggaaagataaacggtgtatcttcgatggtaaaatggattccgtccttcgatctcgccaccctcaaatgggacagggacgttaaataaactgttctctttccgtgctttgtcatcttattaatggttctggaatctgtaaaatccagctccggatgttctgatttgatcagactgatcaccgtaatctcatcttttccgtcaacctttttcacaacgggaaccagtacctccccgtccctggctccctttacagactctgccactctgcacagcagaatcacttcatctctgtatctggcaacgccgcagttaaagaccccttccaccgtaaaattctcctgactgggctttacattattcgggataagaagtggattttctccgcatctttttacttccagcatgttgttcctcctaagtttcattatttaagcataaaactgattccctctttaaagtatttggaaaagcataaaaacagaatgataatcggcagggtcaaaatcaccgacgccgcatacatcggtcccgggaatgctcccattggtttaaactgcgttgaaatcaacacatttaacgtctgcatctgaatgtttggggcaatcagcatatcccacattaactctgaccaccgctgcatgaagatcgagagaaatacgattgtcgtaaccgatttcgttatgggaaacgcgatgtagaaaataatgcgaagttctccggctccatctattttggcagcctcaaagacttcattgggcagtgtcttaaaatagttgatatacatgaaaatggcccaaatcgaaatacacatgggaataatcattcctccgtatgtattcgccatcggcttcgcgatcatatacctgggcaccagcaggatgatggtcgggaaaaacatctgaaacaacagggtgtccatgataaagcgctcccctttgaatttcagtttacacacagagtagccgttgcacagtcctataatgactgagataatcgctgttgggaacgccaccaggaatgaattcaccagagctctgacccacatcatggagtttgtagctcctccttttccgattaaatattcatagcttctcagtgtaaagccgtgaggcaccatcaccttatccacctgatcccacgcagtaaaggactgaagtaccatataataataaggaaacagggatattgccagcagagtcagggtaatcactgtaatcgtaaatgttttaacgccgaatttcttttttcttcccatattcatttctcctcgttatcggtactaccagccgaatcttctgttcagccggtctgtcaccgcgttaataatccttaacgtgataaagatctgaaccgcactggcaatcgccatggctgccccatatcctgactgaaatctggtaaaggacgtattgtaaatttccagctgccatgtggtcgtagtcatattggggccgccgcctgtcagcagatacggctctgtaaagacaccaaatgccagccctgtcgccagcactatgaccgtggtcagcgtcggcataatcatcggaagcgtaatgtgcagaagcttatggagtccggttgaaccatccagcatcgccgcctccgttacgtcatcaccaatgctttctatcccagaaaggataaacagcgcatagtatcccgacatcttccagacaacaatacctaccatgacggcaaacgcatatctctggtccgtcagccagttgatattcagattgaactggtctctcaaaaaggtgttaaatgccgaattgtaattaaaaaagtacttgacgactacgcttgttgcaactccggaggtcagataagggataaagaacagaaccgccaccagcccctttattttgtccggcagattggacaccagaagtgcaatgatcagcccgcctgcaaagcacagcaccacgattggcaggagatagcggtaagagttgatgaaagccgcttttactctgctgtcggcaaaaagaccggcaaagttcctgatccccacaaatgttttctgttccgacatcaggttccagtccatggtcgaaagccagaacgcccagataagcggaatcagaaagaaaatcagggaatagatcagatatggtccattgagcagccatcccataagaccggcttttttatttcccgtaatactctttcttttcataaaaaccattctccttttttggagggcaggaagtgccttcctgccctttaccggctgcctattccaggccgcccgcctgtttcatcgcttccatggctgcttccacataaggtgctgcatccggtgcattccccggttctgcattcatgacttcattcatgtacggtcccgttccgctctcagtcagcgccgtctgaatatccgttaccttctctgttgcaatacttggaatcgcatagggaacagcttctgccagcgcctccagctccggatattccttcatggtatcggcaaacatttcattgtcatttaaatcgcctcgaaccggaagcatcgtcgtggcattcagccagtccaaatcagtctgggcagagttatccttattgtagacccattttacaaactctacggcgcctgcatgctcttcgtcgcttacgctcttatttttatagaataccagaccttttgaatcggcaaagttatatgggatatctccatccttcttcacgattgcctgtccatatacgtaatcttccccgtagactttattgttctcacgatagagagagatctcccacggcgcgttaatcgttaccagtacggaaggattttcctctgtccagatgctggatatttcgccggactgaatcgaattgccaaacagaccgatgagttcaaaggcttcaatggctccctctttgtcaagcaccagtttattgccttccacccacggcttgccgcctgtcagcgcctcatatggcatctggaaatcataccatctgtcccaccactgatccggacgggttaaggacggacggtagaaggagtgtgttacccccatatccttcatgaccgtatcacgctgagcggcgaattccctgatcactgccgtaaattcgtctaccgtctttggcgcatcatcgtaaccaagcgcctttaaggctttcatattccactgccagatcatcggatttacgtataccggaagcacatactgcttatcgtcaatggcccagttagtgatcgtatcttccatttttctggcctcgatcacctcctggaaccacgcctctccggacagatcatagacggcgccagaggctgccagcgtagcagcaaaccctcggttaatattctccgatacggccggtacggttcccgtggcaattgcgttctgaattccggcctccgatgatggagattccggcatctgctgaacttttacctccaccttttttccatctacggtgatgccggcatcgttgaacgcctgcgccttggattcccagaaattatactgtacctgctgaggcgcagtccagaaatcaacggaaactactccgccggccgttccgctattgccgctgttggcggacgagtctgttcctcctgactttccgcatccagtcatcattgctgccgccatcactgccgctgccgcaattgccatcgttttcttcattcttttcataagtctcttctccttctatttgttttcatattcatcaaatggatcatctatcagggctttttgcccttccgcgtcgctgactccgcagtaaagctccgcttttccgcctccaagccttacgatgccgcctgaaaagatcacgtcctccagatccggccttttacacggtccgggctgaaaatcctttctttccgcgatcagcttcatagggctgtatttccccgtctccggatcaaagcaaaagacggtagagtaataatggcggctgcccttctcatcgaaccttgcaatgtgggagagcactccgaccttaccgcatgccaggcggtgaagctcgttggcgccgccccattcctccggtataaactgatgctccaacaattccgcctcctgaagacattcggcattcagctcctccaggttatcaaggaagcgaaatccgatcgtaccgcgtcctcccgtctcaccctgaggcctggtgaataccagaattctgccatcctccagttcacaaagccggatatccttcatgcggtcaggtcccacggcaaatctgctcaaatccaggactccattcccactgtaaaataccgtcctgtagtttaggtgtcccggattctccctgtcatcgaaaacctcgactcctcccagcaccagctttccgccgatcctggtcacaaaaggatcctgaagacaaaactcctcccgatctgcttccacccattccccgtctctttcttcaaaaaagcctatcctggaatactcactgtctctgtcctcgaccctccccgcaatccatgtctttccgtctgcagcaaaaggcgcggtgatattgtacacatctttttcagtttgcttgacagaaaacttcagtttacttgaatttacttgaattttatcctcattaaattcaagcagcaattctctgcacgtacggacagtgcttcgattgaattgtaacatatgttcattttcctcctttcagcctttacttttatgctgtttttgtcttacttatcttgtctatggccttatattattcttgcttttacttgaattcaattcatatttacttgaattttataattatattttaaagtcctgtttttaaggcgatataacttcgtacaatttaaccgcgaaaggatgaaacgtcctgcaagtgtgattctccgttcgcggcaaatcacttttcacggcataattcacggcataataaaaactgctcctactaaaagtaagaacagtctttccattccggccttctggccttttaacccgcgatctgacctgcaatcccgtttcatgcataacaaaaaggcgggaatccatcaatcaggatttccgccttttttaaacatataccctcaaaaccacacattgtacatatcttttcatccgttcttatttcctctttttcctaaaccaacttggttaagccctcgacctattagtgacagtcagctccatacgttaccgcacttccacctctgccctatctacctcgtcgtcttcaaggggtcttactcttgcgatgggatatctcatcttgaggggggcttcacgcttagatgccttcagcgtttatcccttcccgacttggctacccggccatgggtttgatacccaaccggtacaccagaggtcagtccatcccggtcctctcgtactaaggacagctcctctcaaatatcctacgcccacgccggatagggaccgaactgtctcacgacgttctgaacccagctcgcgtaccgctttaatgggcgaacagcccaacccttgggacctacttcagccccaggatgcgatgagccgacatcgaggtgccaaaccactccgtcgatgtgaactcttgggagtgataagcctgttatccccagggtagcttttatccgttgagcgatggcaatcccactttataccaccggatcactaagtcctactttcgtacctgctcgacccgtcggtctcgcagtcaagctcccttatgcctttgcactcttcgaatggtttccgtccattctgagggaacctttgagcgcctccgataccctttcggaggcgaccgccccagtcaaactccccacctgacattgtcccccggccaggtcatggccgcaggttagaaacccaataccgcaagggtggtatcccaacaatggctccggtaagactggcgtcctaccttctctgcctcccacctatcctgtacatgcagtaccgaatcccagtatcaagctggagtaaagctccatggggtctttccgtcctggcgcaggtaaccagcatcttcactggtacttcaatttcaccgggtgcattgtcgagacagcgctcaaatcattacgcctttcgtgcgggtcggaacttacccgacaaggaatttcgctaccttaggaccgttatagttacggccgccgtttactggggcttaaattcaaagcttcgattgctctaacctctcctcttaaccttccagcaccgggcaggcgtcagcccatatacctcacctttcggttttgcatagacctgtgtttttgctaaacagttgcttgagcctattctctgcggcccactctcgtgggcaccctttatcccgaagttacagggtcattttgccgagttccttaacaatgcttctcccgccggccttaggattctctcctcatccacctgtgtcggtttacggtacgggcacgtattacacaatagcggcttttcttgacagcccctataccaacttccctacttttgttcggtacgcgtcacgctttcctgttgttaaacggatttgccagtctaaccagtccggcgcttgccccggtcttttcattcccgggtttggcttcggttctgtgtccccacagttctgataatacgcggtacaggaatttcaacctgttgtccatcgactacgtctttcgacctcgccttaggccccgacttacccagagcagatcagctttactctggaaaccttagatattcggcctggaggattcccacctccatctcgctactcattccggcattctctcttcttaacactccacgcctccttacggtaacgcttcgccgcagttaagaatgctcctctaccaattgaccataagtcaattccacagcttcggtgtcgtgtttcagccccggacattttcggcgcaggacctctcgactagtgagctattacgcactctttgaatgtgtggctgcttctgagccaacatcctagttgtcttcgaaatcccacatccttttccacttaacacgcactttgggaccttagctggtggtctgggctctttcccttttgactgcccaacttatctcgtgcagtctgactcccgtacatcatttatgcggcattcggagtttgatatctcttggtaagctttgacgcccccttaagaattcagtgctctacctccgctaaactaatacgaggctagccctaaagctatttcgaggagaaccagctatctccgggttcgattggaatttctcccctacccacacctcatcgccacccttttcaacggatgtgcgttcggtcctccatttccttttacggaaacttcaacctggacatgggtagatcacccggtttcgggtctgcctgaactgactgtttgataccctttagggtatcactgcgccctattaagacttggtttcccttcggctccacaccttgagtgcttaaccttgccagtcccggcaactcgccggaccgttctacaaaaagtacgcggttccacctaaaatgtggttccacagtttgtaaacacagggtttcaggttctttttcactcccctcccggggttcttttcacctttccttcacagtactatgcgctatcggtcactaaggagtatttagccttggggggtggtccccccgacttcccacaaggtttctcgtgtctcgtggtactttggaacatgcccgctctcttctggtttcacatacggggctttcaccctctgtggccggtctttccaggaccgttctgttaccatacgagtcacttatagcagtccgtaacccctgggtgcacgcacccaggtttaggctccttccatttcgctcgccgctactctggaaatcgagttttctttcttttcctccgcctacttagatgtttcagttcagcgggttcccaacgtatggctatggattcaccatacgccgactgaggtttgctcagccaggtttccccattcagatatctccggatcaaaggatatttgctcctccccgaagcttttcgcagcttatcacgtctttcatcggctcttagtgccaaggcatccaccctgcgctctttttagcttaaccagttcgattttcatctgcgggtgcggattactcatctaagattcatagcgttgaatctctggtcttaggtttgttatcgctgtacgttacagcaacaacgagtttataattttcggttatatctgttacgatataacacctcggatgtcttgatttactctttctcgggattaaactcccttaaaagaatctatctagatatattcaatatgtggttttcaaggtacatgcagactgaagtttatcagtcattagcagactcgatcgactcgaatccactaatcactggtaaaaaccagttatatggaacagcactgccctgctgaatcaggttaacacattctttaacacaggcttcgcctttatctccacccattggaacgtgtccgttctatataaaacactctttcgagtgagtttttttaagtaatctggcacccacctgctctcccatgccgtctccagcatagtaccatcggccgcttaagtcttaaccatcgtgttcgggatgggtacgggtgtttcccctaagcgcatcggcaccagaatctttttgtctttgaaacacaagactcaacagtatctaaaacccctacttcttcttccttagaaaggaggtgatccagccgcaccttccgatacggctaccttgttacgacttcaccccagttatcagtcccgccttcggcagctccctccttgcggttgggtcactgacttcgggcgttaccaactcccatggtgtgacgggcggtgtgtacaagacccgggaacgtattcaccgcgacattctgattcgcgattactagcgattccagcttcatgcaggcgagttgcagcctgcaatccgaactgagacgttatttttggggtttgctccagatcgctcctttgcctccctttgtttacgccattgtagcacgtgtgtagcccaaatcataaggggcatgatgatttgacgtcatccccaccttcctccaggttatccctggcagtctccccagagtgcccgactctactcgctggctactaaggataagggttgcgctcgttgcgggacttaacccaacatctcacgacacgagctgacgacaaccatgcaccacctgtctccactgctccgaagagggacaccggttaaagtgttttcagtgggatgtcaagacttggtaaggttcttcgcgttgcttcgaattaaaccacatgctccaccgcttgtgcgggtccccgtcaattcctttgagtttcattcttgcgaacgtactccccaggtggaatacttattgcgtttgcggcggcaccgaagggctttgccccccgacacctagtattcatcgtttacggcgtggactaccagggtatctaatcctgtttgctccccacgctttcgagcctcaacgtcagttacagtccagtaagccgccttcgccactggtgttcctcctaatatctacgcatttcaccgctacactaggaattccacttacctctcctgcactcaagtctaacagtttccaaagcagtaccggggttgagccccgggctttcacttcagacttgctaaaccgtctacgctccctttacacccagtaaatccggataacgcttgccccctacgtattaccgcggctgctggcacgtagttagccggggcttcttagtcaggtaccgtcattttcttccctgctgatagagctttacataccgaaatacttcttcactcacgcggcgtcgctggatcaggctttcgcccattgtccaatattccccactgctgcctcccgtaggagtttgggccgtgtctcagtcccaatgtggccggtcaccctctcaggtcggctactgatcgtcggcttggtgggccgttaccccgccaactacctaatcagacgcgggtccatcttacaccaccggagtttttcacaccggaccatgcggccctgtgcgcttatgcggtattagcagtcatttctaactgttatcccccagtgtaaggcaggttacccacgcgttactcacccgtccgccgctaagtcaaatcctcttccatccgaaaacttccgaagatccgcttcgctcgacttgcatgtgttaagcacgccgccagcgttcatcctgagccaggatcgaactctcatgttaaatgattcgtttgatccggggtcaaaatcaactaactagctaatttatttcccgttttacttgttgtttggttcgtatacaatacttgtattcgttctgaattttctcattcaaagccatcaaacaatggcttgttttattagaattttcagggttttacatactgttcaatcttctgttttcaaagtgcgtttgctgtcgatctgtgtcagcagcaacttttatatcttatcacagtgattcatttttgtcaaccacttttttcattttcttcaaaactctctcagcggtcaggccggacgtttttcggaaaagtttgccgccgttttcagcggcgaggtatatcttatcaaacctttttcgaaatgtcaacaccatttttcgatttttttattttttttcaactatttaaacttttgcaattttatatattgtatttcttacctctaaaaagcggctcctgaataaccggaagccgcttttttactgcaaatttcgtttctctgattccttctccacatgaacagatcattataaatcataatacctctggaattctgccggatggggaatctgagataactcccggctctccagcctcttcttctccagccatatttcaatcagacgttccgggaacacgcctcccgccgtcaggtaatcatgatcagcctccagggcatcaagcgcctcatccaaagtctttggcagggactgaatctttgctttttcttcctccggaagctcgtaaagattacagtcaaacggcccccagccatgtttttccggatcaatctggttcttaatgccatctaggcccgccatcaaaatcgccgcatatgcgtaataaggattcgctgttgcatccggatttctcagctcaaaccgttttgcctttggcgtcttggcataagccggaattctgatcacggcacttcggttggacgtggcatatccaatcgttaccggtgcttcatatcccggtacaagacgtttgaatgaattggtggacggattggtaaaggcacacagggacggaacgtgctttaacagccctcctataaagtaatgggccgtcttgctcagcccggaatacccttcctcatcatagaaaaccggttccccctctttcatcagaagcatatggacatgcattccattgcctgcctcctgataaattggttttggcataaaggtggcggttcttccatcctgaatggcggcgttgtggatcacgtatttgataatcatggtcttatccgccatgtccaccatatctcccagttctacttcgatctccatctggccagagccgcccacttcgtgatggtggtatttgacatccacgccccactcctgaagcatcatacacattctgcttcttaatgtatacgccgaatcctgaggtgctgcaatgtggtacccgccgccggccggcacttgaaatcccttattatcggcgctctccctgccgctgttccaggccgcctgtctggtatccacggtaaatgccatgcgctgcggctccaccatatagctgacatgatcaaataaatgaaattcgaattcaggcccgatcagcatctgatccgcgattccctgttctttcatatattggatggctctcagactcacatttcttggatactggtcaaagggtctgttctccttccctatcacacatacatctccgcacatggtcagagtcggaatctctgtaaatggatccaccacggcagtccccggatccgggatgaataccatatcgcttttttccaccggagcatacccatagttcgatccgtcaaaaccaatcccctgcgtaaaaatctcttcatcaaaccgttcaaccggaatcgtaatgtgtctccaccggccgtttaaatccgtcatcttgaaatcaatcatcctgattcccttttctttgcagatgcgcaaaacctctgtactctttgacatattttcccctccaaatctgaatggcagttaaaagatctgctatcatgattctaccatatttttgagaaaatatcgtccattaaatccgtttttctacatttttattccatgagtctgcacataaaaaacagggctccacggaaaatgaaaagtatcgaacaatgcagatgctgaaggaaggctgaacagcctttatcgaagacagcagcgcgggcagcgaatccgtttgacttcgctgcccgcgggaataaactgcttctgcatctcttgattactcatattccaaaacattcagccagtggtttaaaagcttctcttcttccggaatccctttcgtctttctcgaagccgctgcaatggagagccactgctgcacgtagtgtttcgctgttttgctctttcggcagtaaagctctaaatactgatccgcagtctcagcatcctcaagcgtcagcagcagatatgtattcgctgcgtcggcggaggcatttccctgcgtcgtatgagaccagtccaggatatgacacgttccgtcttcactgacaatgatatttcccgggttaaaatccccgtgaagtacgcaagcgtgctttggcatgctgtccagacggccccggataataaaacgggtattgggactcagcgcttcacaggtgctgatctggcggtccagcttctccctcagcttatttaaaagcggtgaccgcttactgtgaacaaggagctgcagatcgacaaactgttctaaatactgattccggttctccggctcctccttcatcagctgcgccatggtctttccgctgacatattcctgaacaatggtccattccccctgttccgtcacgtttacacttactatgcccgggatcggaaggcccgtttcttctattcttgcctggtttaatgcttcatttagaatatctgctttggggaacgaacggtcaaataccttatataccaggttcccctccctgtagaccaccttgttgctgcgttttgccagtatctccctctgttccatagcctcttatctcctctcaggatgtatttggaaattatactctattgtaccagacacagggagcgttgaccagcagattccggtctgcgttcgtctcagaaagctacagtttatgccctgccttcttccggtagatcagataagaatatacaccgggaatcaggatcatgcttaaaaatacagtaaagtacagaggctccatgtggaaaaatcccaggatcatcatcagaataccgccaatcatccacacatatccggtcagacgatgcgtccgtgtccagttctcctcatccgccagagtccatggcagtttaattcccagagtataattctgtctgcatttcggaagataattgccgataacaacaaacagcaaagcgatcggtacgcttaccacgcttaccacattgatggaaataccaaccgcagacaatacaatcacaagctgaaccataactgccagcagtacaatgaaccagcgtacaatcgtcatcagctccttcgaacgcctgatattttcccgcttcgggtcaatcacaggaatcacattgacaatcaccgccattagaagcataaatgccggtatcccaaaggccgccatattccggctggaatatccgttgacctggttgtcgcttccccagtgggtcgctacctgctccggtaagcggctgtaaaatacaatggaaatgataaatggcacaagggccagtccccagtacaggagatcccgagaggtcagttttctgtcagtctttttcatgatgttgttcctccattaatgtctgaagccaggaaagcacttcctggaatacggtggtgtttaactcatagtaaatatattttcctgatttgcggtcttcgatgagacctgcctgcttcaggatattgagatgatgggaaatcgtggctcctgatgtatcaaaccgttccacaatctgcccggccgtcatactgcccggcttcagcaaggtcagaatttcccgccgcgtgggatcggacaaagccttaaaagtgtcgccaaagggcatggcctgcacctcctttcgccgcgtacggcgttaaaataaaaatacatttagacgtttatctaatcgtctaaatgtattttatcaaataatttctctgatgtcaattggaaataccaggagcagcagctccttactctgcctcagccggtcttttatccatcagccggaccgcgttgacattccgtcggaaggaatgaaatgcagcccattcaaccggactgttctcaaaaaatgctgctgccgaggccagtaccgcatttaagtcccaggcgataaaatccagatagccgcagtaaataccggtagctcctcccaaaaaagtcatcgcatcatcaccggcgttttcaagcacatacgctatgagctcatcccgaaaatccagaaccacccggccgcgttcctcctcatgtgcaaagctgtccaggggatagcagagaaatccagccgtcacgccatcccggtggaactcgtccataatatcgccctctccccgaagatattcgttaatgactgcagcacaccgggtactgcctgcaaacacatccagcctccagtctgcctccggattctggtccggtaccatctcatagccgatgaagctgttctccagaaagtgctcagggtcactggaacattcgatatccatctttttaagtatctccggaagctcgtctagcaggaccggcactgcatccttcggtgtatcaagcacctggaagtcctccaccagttccatcgcagcaagttctcccagtatctgatccagaagggtagataacagccaccacaccttactctcatccgttttaaaaagcggcagcagtttttcacagtaaagctccaatgagatatgcttactctgggactgttcttccgttttctcaatccatacctgtacgtcctggccggagaccatctcaccgaaagcgcccaggctgtagccacgggaaggctgtcggcccaccagaatattccagtgttccagaacggaagatggagcatggctctggaagtagacaagctcaaacagtttggttcttttcccctcaggagtcaggatcagttcgtactttttcccgttaaaccctaattcaaagctcacatccgaaaaaacggcagacagcagaccggaacacgtttcaatcagctcctctctgaccgccccctggtctttctgatccatcagtgcgcgaagacgggcttcgcccttttcaaatacgctccagccctctgccgttttctcccggaaagactgctcaaaataaggaagagccggacctgcaatattattgtaggcccgcgccagttcgctgatcaattccggcgtccgttcttcaaccggcatcccctcgatcgcatcaatgattttctgatattcgtcgttttcgttccattcctgtaattgctctgtcagcttcatatgcttaaactccctttttgtacggctgttaatcaccgtattctatggtgttattatagcatgtatgaaatatgacagaaagcattttttgctttacgtctgcacgctcaactcttctctcccgccagcatctcatctaacgtccgccagcccagcaccgcgcactttacacgggagggcatgtgggatatatcctgcaggacggccgcttcctccagcacctctaagtctgcctcctccgccgtacctctgatcatttgaaagaacttttcagccagcttcacggcctcttccttcttttttccaatcaccagatccagcatcatatccgcggaagcctgtgagacagcgcatccgtcgcctacaaaagagccctcccggattatcccgtcctccaccttcagtttcagcaggatatcgtccccgcagctgggattaacgccctccagcaccagattggcatccggcagatcgtgcttgtgagccgggtgaagattgtgttccgtcaatacctcattataaaagcttctattctccatatcccatcttcctcctgattccggcagcactcttcaggaatgcctctatttcctctctggtattataaaaataaatgctggctctggtggcagatggaacctttaaatattccagcagcggctgggcacagtgatgccccgcacggacggcgattccatccgcatccagaattgcactcacatcatggggatgaaccccgtctacggtaaaggtcacgatgccgcagtgttcatcaggtttttccgatcccagaacatgtacgtgcggtatctgtttcaaaccttccagggcggcagctgtcagctccagttcccggcgccgcacttcatcaaatcccacggactttaagtagcagaccgcctcctttaatccccaggctcctgccgcattgacggtacccgcctcaaacttatgagggatcggggcgaatacggcgcctgttctggtaacggaatcaatcatttccccgccggttaagaagggcggcatctcctccagcagttcccgccttccatagagcacgccgatccccatagggcccatcagcttatgaccggaaaaggccagaaaatctacccccagctcctgtacatcaattgggatatgaggagcactctgtgctgcatccaccaccacaacagcccctcgttctctggccatggccgcaatccggcgtatcggattttcacatcccagcacattggagacgtgggcgacagccaccagtctggtccggtcagtaaatgccgcttccagcttctcctgagaaatcctgccatccggttcacattccaggaatctcaaaaccgcgcctgtcttcccggcagccatctgccagggcagcagattgctgtgatgctccataatgcttaccagaatctcatctcctgccttaagctttgataatccgtagctgtaagctatcagattcaagctttctgtcgtatttctggtgaaaatgatctcgtcggctgaaggagcattgataaaacgccgaacctcttctctggcctcctccagccactttgtcgcctccatgctcagttcataaaaaccccgcatggggttcgcataacactgctcgtaaaagtcgcgctctgcccggagtacgcagccgggcttttgggccgttgctgcgctgtccagataaatgaccggattatttgccaaaagcggaaaatcctcatgatatggatttctgttttccattctccttcacctccttcagataattgtgtaccatctgctctgcagcttcgtctccgctcttcctgcagacagcctccagtctggcccttgtaatcattgcttcagcttcctcgcgtctcatgcctctggaacagagatagaataagagttcctcgtccagccttccaatggtagctccatggctgcctaaaacgtcctcctcggcgcagagaatcagaggaatggtctgattgaccacatcgtctccgaaaagcagtacatcctctttctcctcgccctctgccccgacggctcccgacttaaaatcaatggttccgcggaaaagcttaaaggctctgtcccgcagcacgccgcctgccaggatccggctgcttgaccgctccccccggtgatctgctgtatagttcatatcaaaccgctgatttcctcttcccaggtagccgatgtccgcattcagaacgctgtctctccctgctaaatctgcccggcagcccgcgtaagtttctgatccgcccaaaaacagctgtactacctccgcagctccgtcttcttcacagcggccgccgatatcgtttaaaaatcgatatccgcttcccagcaattgaagctggatcagcttcagtctgccatttttattcacttgaaaccgggtttgaactgcagccagacctgccgcttccggcggcgaggtgaaatccataatcacggttaagcattccccttcccttaccagaagttccaccggctgaaagctcttcccaccatcgctgcagacaaagtgcagcgcggcacgtttcttctccttcaagggcccggactgaatcctgatcgccgctgtcccggcctctccggccaggcggtccatatcttcccccatgccggtcggaagaactgaaatatcctcattccacggttctgcttccccaagcccttccgttatcactgtgggggattcccccgcttctatctgttttaggtccgcctcattcatcctgagccagttccaggttctggccggcagcctgtttattgttaaatcaagtccctgtcccatagggaacctcctttccgctctcctgtgaaagcctcctatccaatactccccttcatctccagccggatcagatgattcatctctaccgcgtactccaggggcagctccttggatacctggtccgcaaaaccactgacgatcagtgctctggcatcctcctcactcagtcctctggacatgagataaaagacggcttcatcgctgattctcccaatcctggcttcatggccgatatctgcatcggaagtccggatatccatagccgggatcgtgtctgacctggatattccatccagcatcagagactggcaggacacagcggatttgctgttcttcgctcctttggctaccaccacggaactgcggaaggtacttacccctccgctcttggatatggaccgggtgttcatatacgaagtcgtctccggagcggcgtgaaccaccttcgcacccgtatccagattctgtccttcacccgcaaaagtaattcctgtgaactccattctggctccgcggcccttcaggatgctcataggatataagtaagaaacgtgtgagccgaaggaaccggatacccactcaatcgtgccgccttcctccacctgcgcccgcttggtatttaagttgtacatgtttttcgaccagttttcaattgtagagtaacgcagcttcgcatttcttcccacatacagctccacacagcccgcgtggagatttgccacgttatatttcggcgcggaacagccttcaataaaatgaaggctggccccttcatccacgataatcagcgtatgctcaaactgccccgcccccggcgcattcagccggaaatacgactgcagcggtatttccacggaaactcctggcggtacatagacaaaggagcctcccgaccagacggctccgtgaagcgcggcaaacttgtggtccgaaggcttcaccagcttcataaaatgctttttcaccatgtccgcatagtcacccttcagcgcgctctccaagtctgtgtataccacgcccagctccgccacctcctggcggacattgtgatacaccagctccgaatcgtactgggcaccaactcccgccagagatttccgctccgcctggggaattcccagacgttcaaaggtatcctttatggcctccggcacatcggaccatttcgttttcatctttgtgcctggcctcacataggtagcgatatggctcatatccagtccctccagggaaggcccccagtcgggaacttccatgctgttgtaaatctgcagggactttagccggaacagctccatccagagcggatcgttcttctcttttgatatctgctctacaatggccggttttaagccttcctctatacggtacgcatccgtttcctcatttcggatatcatagatgcttctgtcaatatcatttacatatgtcttctcttccatctcggttttcttcctttccggagacgcagactatcggtccgcctgttccaaatactgttcaaacccgtttttattaatctcttccaccagggaagctccgcctgtcttcacaatccggccgtctatcataatatgggttttatccacccgcagagcctccaggatccgggtgctgtgagtgataatcagcaggcctccgttccggtccttctgatactcctccacaccctttgacacggttctgaccgcatccacatccagaccggaatctgtctcatccagaattgccagccccggctttaagagcagcatctgaagaatctccgctttctttttttcacctccggaaaatccgacatttaaatcccggtctccgtacgtccgctccatctgcaggagctccatggccttccaaagctccctgcggaaatcccacaggcgcactctggcgccccttcgctgttccaccgcattgcggataaaggttcccagcgaaagcccgggaacctccagagggttctggaaagaaagaaacattccggctccggcccgcttatccgctgtttccccgttcataagcttcccctgaaaccggatctctccctgcgtcacttcatagcggggattgcccatcagcgcgtatccgagggtagactttcccgccccgttgggtcccatcagtacatgggtttctccttttttgatctcaagattaattccatgcaaaatctctttatcttccactttgacagataatccctttacttccaacaattgatttgccatagattcctccatttctgctgtctaagcttcactcttctatcttttatcttgtacttttattaacctatcatttcgcttggttattaacatcatagtattataagcctactttgtcaataggtttataatactatttcctgttgcgattcctatttaccttgttgtataataggataataatactggtattacagaggggaggtatttcagatgatgatttcgacaaggggacgttatgcgctgcgggttatgctggatctggctcagcagaccacagacaggtatgtacccctgaaagaaatagcgaaccgccaggagatttccgaaaaatatctggaaattgtcataaaggttctggtacagaataaacttctgaccggtctgcggggaaaaggcggcggttaccgcctgacaagggcgcctggcgaatatactctgggggagatactgcgcctgaccgagggaagtctggcccctgtcgcctgcgccgaggaatcttacaccgagtgctcccggcgcggcttctgtctgtcccggccggtatggcaggaactggataagattatcaatgagtatctggatgggattacattggaagatttattaaagtccccgcagaagtctgtataagccgaattcaataagttagaatctgacctttcagaataagacggaagaagggctctgccaggccatctttccaattgaattccttctgttaatattgtataatcattttagatccaaacatacatggaaaggggctggccatggtagacaaaggtgtgaaaaagcatattgtggtttctgccattttagtgtcatttatcagcgcagcactggttttgataggcggcatcagctatttgagtatagaacgggcgcaggaaaaagaagctcagaagtatatgaaagagattgtgtcacagtataagaacattattacagcacagattgacggggattttcagacactggaggcgctggccgtcctgatcggatatgatgatgtcattcatctggatgagacgctttcctgtctggaagaacagagcatccgcaatgactttacccgcatgggatttgtctcacctgcacagacaggatattttatagacagtgacggggaaaagcattttgatgtcgatgtcagtgacgaggcgtttatacagaagaccttatccggtcagcggaccgtgtctgagattatgacagaccggttatccggagagcctgtcgtctgttatggagttcccatcacctatcatgatacgatcacaggagcgatcaccgccacccggctcacctccaatcttacggatatcataagccaggatatcttcgacggcgttgcctatatacatattgttgatcatgaggggaattttattatccgttctgaccacgccgtcattccgaagcagatgcacaatctctttgacgacggggagattgaggacggcatccgggcatccatacttgccagtatggagaataacggtgattcctttgccaccttccgctatcagggagaggcgtactgggtcaccttccttcccatcggtgtcaatgactggcagttattctgcctggtcccgcagacatttctgaatcacaatttccacacgcttctgctcgtgttttcaggtgtcatgatctgtattttctttttattcggaatcctgtttctttacatttacagccttctgaagaaggagcaccagacacttcagcagtttgcgtacaaagatcttttgaccggtgctgataaccggaaccgctttgtcacagaccttcctgcactgttgaaggaaccgaaagactatgccatggttctgatgaatatcaatggatttaaatttgtaaatgagttctttggttttgagagcggaaatcgtctgctgcagcatattgccatggttttgcatactaatgtctgtcatgaggagcggtactatcgggacagcgccgaccacttcggcatgctgctcacctatcatagccaggaagaactcattgacagaattcggaacatccagcaggaaattaacgagtataccgtgagtcccaaccaggactaccgcatcaactgtaattttggagttcatattatacaggcggacaccccctgggatgcgcaccgccattctcccgatacggccatcaacggcgctctgcttgcactcaacagtgtcaacggcaatacctccaatccggttgcgttttacgatgaggccctctatgaaaaggcccgcaagaaaatcgagatagaaagtcagatgtacgcagcactggccaatggagaattccacatgtatttacagcccaaatactatctgaaggacggttcgatgcacagtgcggaagcccttgtccgctggtactcttctgacggcgtcattcactatccggatgaatttatcccggtgtttgaggaaaacggctttatcacggagctggatatgtatatgctggaggaggcctgccgaaaggtctcccagtggaaacagcagggatataaagtcagccctgtctctgtcaatcagtcgagagtatttttctatgatgaggaatatttagacaaattccatgaaatcgtagaccagtaccatattgatccgtccctgattatactggaagtaaccgaaagtgttgcgatgagtaatttagaacaggttaaaatggtaatcagaaagcttcacaaaatcggtttttccatctcgatggatgatttcggaagcgggtattcttctctcaataccttgaaggatctggatatcgcagagttaaagctggataaggatttcctgtctgagcagtccacctcagagcggggcaagattgtgatagaaagcgtaattcatctggcaaaagccctctcaattactacggttgcagaaggaattgaaaatgatgtccagctggattttatgaagtcgatctgctgtgatatcggacagggatactattttgcaaagcctatgccggctgaggaatttgaacgcttgctgttaaagaaggaacaggaggatgtgtaaatctgccggtatgcgtttcgataagttttgaacaaatggcaggtgcgtgatcacaccacagatcacgcacctgccatttgcttatcggagtctttggcttattcccagacagccctttcttctgtgttaaaagatctgaatatcctccagatccggctcttcctcctcttctctctcatcggcaaagccctcattccctttattctttgcgattaccgcatacagacatccggtcacaaccacattcactgcaatcgccaataatcctgtccatgggcgtgtcatggttggaagcattaaaaatcccccgaatggaaccgtggaatcagctcccagaaccatcgtaaccgctccgccgcaggcgccgccaactgctgatgcaatcaaagcgcgtgccagatcgctcatgacgatcggaatgacaccttctacaatgtttaaaactcccattggaacggctgatttcaggttttccacctgctccggctcatagatattcttgtgtaatgctttcgcgatcagatatgccaggccaaatccaattggcgtcgccgtgtttacaagctgaagtgctgtgacaggctcacgaattccggaggcgagaagcgtcagcgtaaatgcgtacacggtcttattgatcggtccgccaaagtcaacaatacacagactgccgattacaaggccaagcactaatttggaggatgtaccaagtcccagcaatacattagtcagccagtttgtaaatgctgcaatcggtacgccaaatacataaatcattaccagaccggcgatgaaagaagaaattaaaggtacaacgactgtcggcatcaatcctctggcccaggccggcagctttaagtttttaataataaacagtgcaaggtacccggcaagatatccgcccagtatgcctccgatgaaaccggcactaatcgcaatcgctgataaaccggctacaaatccaggggcaattcctggctttcctgcgattgagaatgagatccccaccgaaataattaaaggaagaagtcccagtgcagctccgcccatcgtagcaagagcatcccaaaatgtaaactgcccctgcacgagtcctgccgcatagagattcgttccgcccagtgccatcccgattgccactaaaaatccgcctccgcatacgatcggcagcatataggaaatagctgtcagcagatgacttttaatatttaagctctttaacttttccattctttcccctccattataccgctttctccagcatgctctctttccattccatttccattttcctgcatgcggtatccagatcctgatccagtccaaataatcccgcattaccgacgatcagcacatcagcccccgcctctgccagctgcctgtaattttctttattgcagtggccgtcaatctgaatcttgtaatgatagccatttttctcccgcagttcttttgcctgcatgattttattgtacatctgatcaataaatttctgacccgcaaacccaatatctaccgtcataattgtcagcatatcaatatactcgaggtaagattccacatagctgagcggtgtcgccggatttaaaacaacgccgcacttacagccaagcttctgaatcatctgcatcgtgcggaatgcgtccgtgttgattgtttctgcgtgcgggctgatataagttgctcctgccgcagcacacatctcaatccagtcagacggattggttgtcattaagtgtacgtcaatatccgtattcgtatgttcccggaagctcttaagaatccccggagtaagcgccatatttttgcagaaatggccgtccatgatatcgacgtgatagagtttcatatactgatccataactgcaaactgctcttttatttttcctaaatccatacacatcagtgatggggcaaatgttaccatattcgtttcctcactttcacataattgaaatttcatcgagattcagttcttcttcctcgtcaggctcttctttccttatacacccatcatcggtaaatgcgagcataacctcctccgcggtatccgcatcgatcagcctgctgaccactgcacgatcccccagacgttttgaaaacattgtcaaaagccttaaatgctcttctgccgcctcatggtccgcccctacggcaaacaggataataaccttagcgccagcgccatccagactctcccactcaatctcatggtcaagaactgctattgcagcccccggtgtgatgacagccttactttttccgtgtggaatcgcgatgtaaccgcctatcccggttgcccccatttcctcacgcacgtaaacatcttttatgtattgctctttatcaccaattacccctgcctcagcaaacagttccgccatggcctccagagcttccgccttctgattgaccttcaagtgtgttataattgtccggggattaagcacctctgtaaaatccatgttctcttcctccttattttgcagcttccattacctgtttcgccttttccatcagcttgtttggtgacttgatcgcaacatcggtagaaacctgtatggttttctttccttcaaaccgatcgcggtccgcaatctttacatcaatcgccagtatgacaagatccgccgctgcaatgtcctcctgtgtcagtgcgttttctcttcctatgcttccctgtgtctcgaactttgcttcaaagcctgctttctctgccgctttttccagcttctcctgcgcgatatatgtgtgtgcgatccctactgtgcaagcacaaactcctacgattttcatataatttccctccttgaatttttaattgctcttcgttttctgtgatttcactataccattccgccggttcaaacagaagtccagaagatttcaacttattttgcaaagcgttgtactgaacgcgcagacacttcagaggaatcgagtaggagggagtgattaactcccgtcctctcacaccaccgtgcataccgttcggtacacggcggtttcaacggttgacgtgcacggactgataggctgtggctaaatcataatagcctctgtttatcagtctttcttttgtcattgccatatttaccgctaccgtttgtgtggtaaaccaatagcctcttcggctgttccctgccttccatgccaattctttcggcactcccattttcagcaggttctttaccttcgttttcggtttcttccattgtttccatatacacattcggattctgtgatatagccattggttcagtccctctattcggttcttcatatctgctactccataataattcagccagccccgcatatacacctttatcttttctaacgatgggcgtatgctctgaacagaccttcgggaactaaggtctttcagttttgacttcattttcttccatgacttcccatgaacccggacataaatgccctttccgttctttcccaatgtgaagccaaggaacttaaaatttcggattgcaaatacacttactacacggcttttcttctggttcacctgcaatttcagcgtcccttccagatatttcgtgcttgtttccagaagtctctttgcggctctctcacttttagctaacaatactatatcatctgcgtaacgtacaaaagccactccccgtttctcgtactcctggtcgaactcgttcagatagacatttgccagcagcggggatagatttcctccttgcggcgatccttcctctgtctccatgactacaccgttttccatgacaccactctttaggtatctctttatccattggataaccctttcatcctttacatctctgcgcaggatatttaatagcatttcttggttcagagtatcaaagtatttcgacaagtccaatgcaacggcatgggtgtatccctgttctgcatactcttttacctttaaaatggcgtccctggcgcttcttcccggccgatacccatagctgttctccgagaacagcgcctcatagactggcattaactgctgtcctatggcttgctggaagatacggtctttcacggttggaatgcccagctttcgcattcctccctctggcttgggaatctctactcgtcttactgggtcgggggtgtattttccccttttgattctctctatcagttccttttgattttcccttaggcagtcacctgtttcctctacggtcattccgtcgattcccggcgctcccttattcgcctttactctcttaaaagctctgtttaagttgtccttattcagtatcttctctaagagttccggctgtgcactgtctctttccttccatatccggcggaaagaacggtgcgctctcacatacccttcacgttccgcgctgtctctttgtgagcagctatctctgttttctgtacccaatgttctttcctcctttcccggttgtactaaagactcctgttgattcggtccttcgtctctcgactactatgacctctgctgacttctgtacgttcagcactacctcacgatagtggttatccctttcaggacattccgcacagacctccccgggtaccacacgtttctttctctccatctatctgccacatttaccatacatgattccgtgtggttattgggcttcgacttgtttggcagccttaccctcacgcatggcctgatgtgatttctgttcgtcagaccagagatttgcccatgggttagtatgttccccatatccagcttccttcagattccacctcacgatggacacccttgccttcggctatatccttcccaccaccgggcggattccggacttgcaccggttagaaacgtgcgccgccgggcgcaccaaaaaaactgacaggcgtaataaccacctgtcagtcactgctttttacttaatcagctttcaatgtttttcgatactttgccgtctgctcccatatgattgggagaataaatacaagaacacataccagcaggatccctccgcctgataaaacggaagcgagatttccaaataaaattcccgcgatacaaaaatccgaatcagagaacgaagtccctgacagatttaacgttccaagcactggcattacaatcagggccagcacggaaatcaaaatgccgtggacaaacgaaccaacaaggcaccccttgactccgccttctgtattcgcaaaaacaccggctgagcctccgcagaaaaaatgggcaacgacgccgggaacaatcacagggacgatcagctctccgaaccaggtattaatcccaatcagtataagcattgttacgatgccgcccaaaaatgacatcagaaaaccgatcatagcggcattcggcgcataagaaaagagaaccggacagtcaaccgccggccttgcgtgaggcacaattctttttgcaattcccttaaacgccggtacgatctcagcaatcaccaggcgtacgcctgacaggataatatagatagccgccgaaaactgagctccctgaatgaccgcatagatgatccagttttgaaaacccccggtcttgtaagaaatatccagcgcggccagatccgtccgcgctgccgcaattccactgaccaccaaaaagatgcctgtcattacgataaaaatcccaacagttgaatcccgcataaatgacagctttgtaggaaaacgaatatcctccgttgacttgactgttcctgtctctaaagctgcggtctttatccgcctgtctttttttgctgcaaggcgcgcggtctttgctgcaatcagatagccgcatgtggaaaagtgcccaagtgcaattccattccctccggttatctttttcatctctccctgtgccagtgccggcatgagcgccatgaaaagccccagcataagagctcccgccgcaatgatctgccattccttcatgctgcttccgctcagagccacggtcagaaggcaggccatgtagagcgtatgatgtcctgtcaggaaaatatagtgaaacggaccaaaccgcgcaataacaagattggcgaccattcccaaaaacataaccatcgatacttccactgcatattgtgcaactcccagtgaagcaaccgcctccatattcggaattacgccctggatatgaaaatcgtaattaaacaggacaccaaaatccttcagtgcgcctttctgcagaaaatcagatccggctgataaaaggacaaaacctacaatggctgtaattgttcccttgatcacatgctctacaggttttttttgcagaagaaggccaagtagtgttacaaatcctacaagaaaagcgggggtagccagtatttcccgaacaacagtaacgatctgcatacaattcctttctttctatcgatctgtcagtctggagcgaagaatatcacacacctcataagcgctctctgctctgaccagctcatcaatctgcctcggtttcgcaagggttttacgaatatcctgaagaatccccatatgcttctgctggtcttccacaaccagacaaaagatgactctcgccgttttaccgccttcaaactcaattccgtccgctgctatgccaatggacagatccagatgttttacaccattttccggccgtgcatgagcaagaatcaaatcccgggtaataaacatataaggccccgcctccaccatccggtctacgatacaccgtacatactcttcgctcatactcccccgttccagaagcggtgatgccgccgtatagagtgctctttcccagccggtcgaatagccatcgccgctccactcccttttctcttccgtcctctctcttccattacggtcaagaaacaggattctgtcttctgtcagaaagtccgtaagccgccagatatcaggctttaagactggctgtttttcttccttctgccgtgcaaagaatttttccagttcgcgcctcagttccatatggtgctgcggatcaacatattttttcaccactttaaataatgcatctgtatcgataaagccaaatctgctgcggatcagcggatgattcagaatatttttacggtcgaaatcatttaaaatcgtatttaccacgataaccggaacgacagcctttacatgaacggatgtaataatgatatcgcacatattttgcggatttacgatttccgaagctgccattacggcgacgatcctcgcctggggtaaaattctcttcagttcatgactgatcatatttcctgttgccaccccattcatacatgccacaagaatacgcagttccttttcatcacgttccgcatattctaagtgggcgccgaaatggagggccagataagccacttcactgtcagaaattaaaactccgatctgctgttccagatactttactacagcccgcgttgtatcaaaaatataaggatactccctccgaatgtcttctgccatcggattgccaatctgaataccaaaccggtaacgataaagagaggctgcgatatggcggtacaaattgcggatcagatcctctttccgttcgaatagaacacaagcctcccgttcaaattctgttatcaggttttttgtgatttccagggcaaactcattatccccggtgtcggcctctgttctggaataagactccagccttcctccaagaaaatgcagtgacaaatataccttttccatatcagacagcgtcggaaaatattccattaccaactgatattcttttgaaacctttaccttttctgtgcttacatccgtaaaatacaggctgtcctctcccttttccataaccggaagcattgcggcaagtgcaagcatatcattccggacgtaacttacccccaactgtttctccacctgttcaatctgttttaaatgaaattccatctcatccaaatacagaaagcgcagctttccggacgataaaagaggctccagcatgttaaaatacagaaaaaagatggcacggatacgaatggggtctccatcgatccaataccctcttttcttttcgtatccgagcccaagctgatatgcatgcagctgggagataaccgcctgaaggtcaacaaatattgtattacggcttacaaggcatgtgttcatcaggttttctacatagactggttctctggagactataatctgacacacaatcatacgagtccgttcacttggtgtgaaaatgtaatcatcatgcggctgctcggtctgcataaccgcctcaaaggaacctttttcctcttctgtaaaaggctgtatcttcccacgtatgatctgaatatccggcagatgtttcgtatggagccagtcattcgcccggtcaagctcgttataaaccgtacgggtggacacagctaattcatccgcgatctcctgaatgctaagcgcgccgactcgttttaatatcatatcgataatcttttttgtacgttcatttagatatccaactgccatagagtcattcaatccccaataatggttttaatagttccgctgccatctctgaatccataaggtcctccagaccaacggccggcaaatcccccagactttccagcagctcctgagatacaataaataaatctgccctgtctgcagaaatatccgacaaagagccaaaggaaacctcgatatcgtccattcccagatactccaaagcctcttctattgtcatctgcataatcaatgaagtcccgacaccattgccgcagcagcacattatcttttgaatcgcttgtctgatcatgtctgttctttctccgaatttttcttatgtgatcttatagaaatcaaaccgcattccttttgatttattataccaactggcgggaaaaaaaacaatctacttcccgcttcattacaaatcattactgcatatcgttctgatcagctgacgttgtattgaaaaacgtctggagcagcgcggataacaaacgattatgccatgtctgcatgacgtaatgattcaccagttccggattgtctgttacaatgccatctacctgacactgcaaatttttcttaatggtctctttcgagttggctgtccagccatatacgtctttgccattccaatgcatgctcacaaccatctctctcgtcagcatggtagtttccacactgaaggcatcaataaaatcaatatcgtattgaagtgaataaatcaatggcgtgatatagacggtttcaatttgggggttaatagctttgacttcttttaaaagttccagattcatagaaccgatattgcactggtcgagcatatcatatgtttcaatgagtgcagcgactctttccacaagattcgtctcatgcccggtggatttcagttctatcataaccctaatattgtccctggctctcatcagaaaatcatccagttttggaatccgctcaccggaaaattgtggagaaaaccaactgccggcgtcatagtgcttcacctcatcataccctgcctcccacacttttttgttctcgcctgtagtacggttaaagctgtcgtcgtgcaatagaatcagttctccatctttcagctgctgcacatcaatctccaccatatcaatgttcatggcaatcgcatgatccagcgcagccatggtgttttccggtgcaaataaagccccgctgcggtgtgcaacaattttgggccctgcataggtttctgcagtaaaggaaccgcctaactcagtctcgctgaatattacaatcgcaatcacagtgaatgcgattacaacagcctgcttaaaatggtaaagaagtcctgttttgtttcgcaaaacggctgacggtctgacgtcttctctatactgatgatacaatgatatgagcagtgaaaacagccagatagtagaaaggctgctcaggataaatacggcagccggcactgcccggtcaaagtaactcacaaatgtttcagccgccataagcggaatttctacctgctttgtataataaaccaggcccagattcgcagcacccagcagaagtgctgcagcaataccaaaggcggcaaatgcccccaaaatatgaagaagcacagcagtttttctcttttttaacagctgtaacccatcatgccaggcagctttcatggactgattctgaaacagagtacctggcagaaagagcaggaaaagtaagcaggccgcatttgctatgacggcaataataataaaagcagaaaaaaacagcttgttttgctgaataaaatccatgataaactcgggtacactgagccagcgtaatatataaggcgtaaaaggcagaacagttaaaaacgtagtcagaataaatcctaaaaacagcagcagattctgtatatgaaatatttttttgcagtgagccagcgtctgctttaacagctgcaaaatggaaatgcggcgctgctgccacccgttttcgcagtaaacaaagagtgccaccgtttcaaagaaaacggaaaaaacagtcagaaacaggatacacagacacaaaaacacggaaaacggcttaagcagaataagtgagaaattctccgccgacagataagataccccggcagttttcaagatcagttccagcacatcactcgtaaccgagtaaagaactgagtagctgaacattttatacagcatattgaaggccaacagtacaggccaatttttaagcgatatatcaaaagagcattttattaatcgtttcatctttacctctgtccatttatttacttcgtcacggggacaagtatactatatatgatgtggatatttcaatgaagataatcagaagatatactgagttttttctaaagtttatcatgtcggatataccgtaactttttttacaaaaaaagcgcgtaagaacatgatgttcctacgcgccttagtcctgccgtacctctatttcgtctcagaagccgcctcttctgtcccctctgccggttcctccgctgctgcgtgcaccgcagtaaccgttgcgacggttgtatctaaatcagtgacgagatcaacatttttattcttcgcaatatctaaatccgccacccggattgtatcaccgaccttcatatctccaacgtcaatccgcaccttatcaatcagggcctccggcaaagccttgtacgaaatctcctgaagctgctgctgcaggactccattcatcactttatcgtgatttaccaggataacttccgcgacggagtggactttttcgcctcttacaagcgcctggaaatcaatctcctctacgatccccttcattgcattaaaggatatgtctttaatcaggacatcgtaagcctggccatccacgtccaacaggatctggcttcctttattgcaggttttaagaagccgttccaccacagttctctcgattttaacaggtatggattcctggatatctctgccaaagacattaccggtaacgtacccctctcttctcaatcgttttgctttgatggacatgcttctcttttcagcttttaaagtattcatttgtcttttcctccaaaattctgattgcttagcagccttcaaatttgataaacaaataggtgtgttaagtaatttatactgttacaagtacattatatcactgttgtcaaccccggacggcggaattatgaagccagctctacgttctccagcacttccttcatcaccccgataaacatctcattttcctttgccgttcccacagatacacggctgatctggttggaactgatcatgattccgcgttccgccaatcgatccctcagccactccgggcttacgtgggcatcaaaatagatgaaattcgtctgggagtgatacactctgcaccccatggcttccagctccgtttcaatatacttacgtcccgcgaccaccagggccttaacctcctgataatactcctgatctttcatcgctgccaccgctgccgcctgccccatcttattgatattacagttacacgggcattttttcatggctgctattaactccggcgcagccgccacataaccaacccgtacgcctgccatggcataatatttggaaaacgttctcagaaccagcagcggtttttcgattccctgccggacgagatctatcatgctctcgcagtcaggagctgttgaaaattcgatataagcctcatccatcacgataacgatatcctccggaacccggtcgatgaatgaacgcaggctgtcgccgttcacatacgttcctgtcggattattgggattacagatcactatgattttcgttttttccgtaacagcctcaaggagtccctccagatcataggttaaatcgctctttaagggtaccgtcaccggtttggcctggtgaatgtaagccatatcgagaaaggcggcaaacgtgggacacatcagaacctcatctccgggatttaagaacgtattgccgacaagctcgatacaggcgctggaaccggcggctgtgatgaaattatcatagctcatgccgtaatattccgccaaagtatttttaagctcatttgcctgaaaatcgccgtagagatttgatccggcagctgtctcggcaattgcgtttaatgctttgggcgacatcccatacggattttcattgagccccatccggacaagacggccgatatctgtttttccgaaattcgcgctcgctctcctgctttccggcttattggcaaccgcatcactgaacacattccattctttcatatccttcacccttttcctttctatgccagaccgctttttacagcggtcttctctttcattttcgcagaaataaatctgtttttgttcaatactgtttctccgtctctcagccttccgacccgtctgatatcttttccatacagacaggacactaccagcagggaacaggcatctgaaaacggagccgcatacagtacgccggcaagcccgaagaacctcgggaagagaagcagcgccggaatcaggaagatcccatgcctggaaaacgataccagggttgcctgatccgatcttccgatggcggaaaaatacatactgaccagcatctgatagccgctgaacagcgccaatattttacaaatcctcatcgcataggcgccgaaggtcacaaacgcctcgtcccccgcgccaaacatccggacaagagctgccggaaccgccatcatggccgcccacacggccgctgacagtatcacggtcatactttgggatatcagcgaagccttttttacacggctgtactttctggctccataattatagctgataaccggggaagccgcctggttaataccggaggtaagagagacgataaagctctccatcgtcacagccgcagccatggcggagacgcacagttcgccgcctcccaaaagtgaatagaccggatcaagatccccgtatttcagcagcgccttattcatcataatattggtcacaaaggaaagcatctggaaaatggatggagcgattcccatttttataatataaatcatctgccgtccatccaccgcgctgaagcccgcccattttaaaccgctcctgcctgtgaggaagtacgccgcactgaacgccgctcctgccatctggctgattacggtagccagcgccgctccctccactcccataccgccccgcgcgatcaggaagtaatccagaatgatattacagaccgctccgatcatattggccgccatggagtagcctgcgctcccttctgttcggattattgccgccagtcctacattcagcatattaaatacctgccccagcgacacgatccgcagatattctacggcataacggtacgtctccgtttcctccgaagccccgcacagccggacaaaaggttctgccgacacggaaaacaccagagatacaaccgtcgccatgccggtggcctggacgataatattcgtaaaaaggcgtcctgccttctcatcgttgccgcttccgattgccagtgaaaggagcgacgctcctcccaccgtgataaacagggacaaggcaatcatcacattattaaaaggcgccagtaccgataaaccgcccagcgcataccggcccacataatttcccacaaacacctggtctacagtccggtagagataggttgtcatcgtccccagaagccccgggatccccatagacagaagcagcgggaacagtggggccgttcccattcttgtcgtactctctttcacctgcttttaacttcttctcttcttcctatgcaatcacactggtcggcatcccatgaatccagttttttaagttctccgccgctacccggactgtcctgtatctggcctcctccggcgcccacgcgatatgcggcgtaatgacggcgttgctgcagttcatcagcgcgcaccgctcctttaacggctcgttgtccacgacgtctaaaccggccgcgtatatttttccggaatccaacgctccaatcagggcttcctcatcgatgactgcgcctctcgccgtattaatcagaatcacgccatccttcatcttttctatggcggcgcggtcaatcatatggtaggattcatcggtcagaggacagtgaatcgagatgacatcgctgcgcagaaacagttcctccaatcccacctgttcgataaaatcatactccggaccggtcttcttatggcggctgaaggagatcaccttcataccgaatcccgccgccatacgggcggtccacaggccgatgcttccaaggccgatgattcccatggtcttctcaaacagctcaatctgcctgctctgcacccgcaggccgccgccaaatccaatgatctcatggcgatccatacattttttatagtactcatcctgaagtctcacattatggcagatatcgagcagcagcgccatggcaaactgagcaatggtcacatccccgtaaaccgtattcgtcatggtaatgtgatgtttctctgccgcgtcccggtcgaactccccatatccatgggcaaacgacgcaagatactttaacctgggatggttcgataagaacgtctcttcgcagcagtcctgaatccaggctcctaaaagtgcgtcggcatctcccgcaatctcatccttcttcctgctgctgaacccgttgtgaaatacaacctcatccacctccggaatctccttcagctgctccttccaataacggatcagttcctcccgcgaaggccgccctcctatggcctcgccctggcaaattactactttcatcctttctctcctcctgttctaagttttagtcctggtctccctgcatggcgtcgtatccggtctcacccgtacggatcttcacggaatcccgcacatcatagatgaatattttcccatcaccgatatggcctgtatagagtactttcctggccgtagacacaacctcctccacagggacctttgccacgacaacctcgatctttaccttcggcagcagcgtcatatccaccggaactccgcggtaatactccgccgcccccttctgcatcccacatccgagaacctgcgtcaccgtcatgccggtaatgccgattccgttcagcgcattcttcagatcttcaaacttcgactgcttcaggataatatccaccctggacagctctgattcccctgtctccgaaacccttgctctcacaggaattgcctcatccaccggaatatcccgtcttccgggagctgcgccgagtacagaatccacgtttgccatcagatcatcggccggcaccaccggaaggaaatcagcgtaggcgtttgccagaccgtgttccgtgctgtcaagtccctcgatctcctctctcctcgtcacacgaagacccatggtcttccggatcacgcggaatacgacattcatggtcagaaacacccaggccgccacagaaagaacacccagaagctgaattcccagacaggaaaaacctcctccgtagaacagcccgccttcctttgcaaataagccaaccgcagcggcgccgaacgctccgcagacaccgtggaccccgatcgcaccgaccggatcgtcaatcttcagctttttttcaatcatctcaatcgcaacgactaccaggataccggcgcagataccgattgccgccgctccgaatggagtcactgcgtcgcagcctgcagtaatggcgaccaggccggccaatactccgtttaacgtcatggagacatccggctttttatatttgaaccacgtataaaacatggtggcacagccggccagcgcagccgcgagattcgtattcatgaagatcagccccgccgtctccatggcgtctccttccatactgacagtagagcagccgttgaacccgaaccagcagaaccacaggataaacactcccagcgctcccagtgtaatgttgtgtcccggaattgccttgattttcccgtcttccccatactttccgattctcggcccgagaagatacgctccgaccgcggccgcggttcctccgaccatatgtaccgccgcagaaccagcaaaatcatggaaccccagattggcaagccagccgccgccccagatccagtgcccggagaccggataaatcaccatggagataacggcgctgtagacacaataggccgaaaatttcgttctctccgccatcgccccggatacaatggtggccgccgtcgcgcagaagacactttgaaaaattacgaaggtccatttggagattccggccggaagcacagaatcataatttcccatcaggaaaaaatcaaatccgccgaaaacgcttccccaggaaccgaacatgataccaaacccaacaaaccagaagatcggagttccgatacagaaatccatcaggtttttcataatgatattgccggagttctttgctcttgtaaatccggtctccaccatggcaaatccggcctgcataaagaaaacaagagcggcgccaaacagcacccatatcgtattgacagccgacatactctccacctcttttctaagacgattcctcacccgcttttcacacgagtccgccgtcttccataaatacagttcgctttaacaaacttctgccatcccgtcgtttggacttgtgatgcgctttaaaaactgcttcgttctggcctccttcggattgaccagaagctcagagggaggtccctgttccaccaccacgccgccctccatgaagatcaccctggaagccacctccctggcaaatgcaatctcgtgggtgactacaatcatggtaattccggtctgcgctacggccttaatggtatttagcacttcccccaccagctccgggtccagagccgaggtcggctcatcgaacagaatcacatccggatccaggatcagtgcacgggcaatccccgctctctgctgctgccctccggatatctgagagggataaaaatcacaccgctcggacagtcctaccttttccagtatttcccggctgactctctccgcgtcctccttcttgaactttttgaccgtcaccagaccttccatcacattttccagaattgtcttattctgaaacagattataattctgaaacaccatggcggttttccgtctgagttcaataatctgggacttcgtatgcttctttgcgttcaccgtaaaatcgttgaccgtaatgcttccgtcatcagcggaatcgagaaaattcacagtccgcagaagcgtcgtttttccggatccgctggggcccagaatgaccacaacctctccttttttaattgttaagtctacgccttttaaaatgtgattctttccaaatgatttgtgtatgttgtcaagtctgaccatgtattccatacaaacagctcctttctcacgccgccgcaccggccctgaaacgttttaaacgggtttccactgttccgaacagtctgttgaagaaaaaactgatcagttcatagatcactgtagtgatgagatacgcctcgatgaaattcagcgccggcatcgccagtaaattggctgtggctgtaatctcataaaccccgacgtaatacgccagggacgttcccttcaccagtcccagaaacagtccgcccagattcggcaccgccacagccatggcctgtggaaatacgattcttgtcatcgcctgcagcttcgtcatccccacgctgtaggccgcctctctctgtccttcatccaccgccccaagcgcggcccggaatatttcggacgaataggccgcctgatccagggtcagggccgcgattgcatatacggcaggcggaacaaccgatacgtcgaattctctcccgatgctgactccatagctgtaaaccataacgggaagcgcataataggcaacgtacaaaagaataaccatgggaacgccccgcataaaggagacaaacacggcgcatatctgagagactaccggtgtttttgccctccgaagactggcaattccaagtcccagaagccagccggccgccgctgataaaagcgccagcatcagcgtgacgggaatggcctttaagatatccggaactgcttccgctataaatttaaaatctatcatccgacttccctcctatccggccgcctgccgtctgccctttgtatacagtttctcagcccatttactgagctgctccaacagagcgcataccgcccagaatatgatgcccgccgctaagtatacctccagccggttgctcccgtagctggctgaactgatcgccctcgcctttccaagaatatcaatgactcccaccgtaaaggccagcgaagtctccttgaacaggagaataatattgtttcccagcgtcggaattgcgatgccgaatgcctgcggaaatataatacggaaaaatgcggagcttcctttcattccaacactgtaggccgcctccctctgccccttttccaccgccagatacgccgcgcgcatcatttccgccatattggccgacgtactcagggagaggcttgcgataatataggaggtcttgctcacccccgataaatcgacgcccagtgccgccatcacctgcggcagccccagatacagaagaaagatcagaacgagtgtgggaatacctctcataaacgatatatacccctttgagattctccccagaatcctgtggctgctcagcgccccggctgcaaccagcgttccgattaccagactgaacagcagcgacagcgccagaatctccgctgtcatcggaaaggccttcagaatcctcggaatatatcccggcacctgcgataaatggtatatattttccatatgcttccctccttgggactcgtactgccagtcacagcggcagaatcattcttattccactgaaatcgcaaccatatccgcataggaggtaaaaacgtcttccccgccgaaccatttcttcgagatttctccgagcgtcccatcctccttcatttctttcgtcgcctggcttaccgccgccacaagctccgcctggtccttggcaaacatcatatatgtatcttcacacatcaccacatctgtcagggttaaattcgtgattcccaggtcatccatcacactgtcatacgttgctttgtacgtcagagccgcgtctacctgcccattcgacaccttcttataagagtcggcagtcgactggtcgcttactccgataatctcaacctcgttccccggatgagcctcgttatacgccatcatcatctgatactcgtatgcgctcggattctgttccatggtctttcctgccagatcggccatgctggttattccgctgtcgcttctcacacaaaggctcatcggagacaggcagtagtactcatccggaaataagtacttttcttttctcgcctcactctttacaagctgatgagacagcatgtcgatggaaccggaatcaatggagaccaccagtgtggaaaagtccatggtctgaatatcaaattcgtactgctccagccgcttatccagctctttcagcacatccagatcgtagccgacgggatttccatcctcgtcaaggtaacagaaaggagctgcattgttgccggttccaacctttactaccgtaacaccgtcggcagccggcgcttttgcctctgttttcgcaccgcagccgctcagcgcgcccaccgccaatgaggcagccagagccagacccgttaatctcgttccaaacattctctttttcataatgattctcccttcttccgcatttcaccgcggcagccacgttgacagtctttcagataaacaaaaaagacgttcggcgcggcctctccgcatatccaaacgtctttgtctgccctgtctccaggtgattttgtttacttgatacgcttattatacatgtataatttcaaatgtcaattctattttttattttcggcattctgcctgtaacgcttgaaatcagcacctgtatttacggtatttatttccattttcgttttttcattatacatgtataatatattttatcaaacaaaccacgaaaatttcggaatattttcaagctgcaggaggtactgtcatgaaacataataacagaggaagtgaaacaaaggaaagcatcttaagggcaggccgcagccttttctacgaacacggctataaagcaaccaccgcacgcatgatcgccggacaggccaacatcaatctcggcctgatcgactactattttaaagggaaagaagaaatcgccacactgatttaccgcgatgtccgtaactcctttgaatccctttttcttgcctgcgagccgcagacgactcctcttgatatgttttttatctccagcgcgctggaactccgtctctgtctggagtgtctgccctttggaaggttttatgatgaaatcatactttttcctgccattcatcaacgcctgttaacctttaatgcctcgcgcattaaagaatatggcgctgtcggaaaagataccgactatcccatgctggctgccataagtatcgcttccattaaacccgcccttgtggatcacgcactccactccggccacgcactggataccggtaagtatctctcctactatctggaacagcagcttcactattttggcctgcataaggagatggctgcccgctatcaggcccttctttccggatactatgtgaacgctgctgcaaattttacaccaatcctgacgaaactgttgtagtctgaaatcacacgacagtcaatcggaggctttacaaaaaaaactacggcagcaggtaagcatgatccgtttacatttattttatttatttgtaacgaatcatgcaaatatgtgatataagaggtgagaggaggtggagaagtgaaaggttcccatgagcagaacatggatatggaatccatttatcgaacatatgaaaatttagtctaccggttcctgtatgcccgaacctgtgattccgaatgggcccaggagctgatgcaggaaacctttttgcgggccattacctctatctcccggtacgatggttcctgcaaactgtcagtatggctttgtcagattgccaaacatgtgctctggcaggaattgcgtaaaaagaagcggctggaaccggtagagctgaccgatgcactgccggatacttctgttttggatggagaagccagtgttttacagaaggaaaacagactggagctctatcaggccattcaccatctgccggaattggagagagaggtagttttgtaccgcataaccggggagctttctttccgcgatatcggggaaatactcggtaagagtgagaattgggccagaaccgtattttaccgtaccaagcaaaaaatcagaaaggagctgaaggagcatgagtcctaactatacttgtgatattatccgggacttaattccgggatatgtggatgggatattgagcgaagccggtactgatttggtaaagtctcatttggaatgctgtcaggaatgccgtgatttttatgaagaactgaaagcggacatgaagctcgctgcagaaccgtctaaagaagaaactcttgtcctggatggatttaagaagataaagaagcggaccagaaggctgaagcttgcggtagcgatagtttccggcctgctggctgcctttgtgctgactgtattgattcgggtttttatcgtcggggtacccttagaaccccacctgatccagatatcgcatatcgcatatcaggaaaacacagacagtttaagcatggaaggggatttgaatatttccggctatcgtatcagccgggtggtatggaaacagagtaaaaaggacaggaatgaagtcaatgtgatcgtttatgcagcagaaacccttccattttttcatggaagcactcatttttccatcgaaatcccggatatgaaagggagaaaagcctatctggcctgccctgagtacgaccagcttgaggtatataactggaagaccgatcattatgaaattctggatcagctggaaaaagaaatccaacagcgtattccggactgggatgaaacaagggacattcttgaatacagcggcggaattactgctgttgccggagaagaaggcatcagttattatatgacctatttaattggaaaagatgcatcttactggcgcttgaatgatcagcttatcaccgatggggattttaaaccggcagattttgagatatggatatccctgaaagagcctcatcagatattgatctatgattatcagacaggggaatggaatgaggattattccatagttgcagaacgcagacctgatgcctgatattaggctgttcaccccttccgcccgcctccagataagcgatgttcaaaaataattcaaaaaaatagtttctttcatgtcggagaaatgataaaataaagaaaattccggtttgggaggatgaaaataatttggatgatttaaatttatataatatggcttacaaacatctgtttaactgcattcattttggcttatatcccactggttcaagtcttcctacagtacctgaactttgcaaaacctttaatgtttcaagctccacaatccacaatgcgctgaggctcttacaggaagatcattacgtttccttaagccagggacggagtgcaattgtgacttacgatgtcaacgaagaggaatgccggacggaatacagaacctacagctatgccaccaaagatgcacttttggacttatgcgatgcgatgctgatcatctggccggaggtgatgctgcagggtctgaaactgtgtacggatgatgacttggaaaaactcaccgagatctttcaacggatgtcgccttgtaatgaatatccgttttttgacttttttttccatatcctgaaaggcctgggaaatcctctctttctcaacttatatttaagcacaaccttctttggacactccaccattatgcgcctgagggataaggcatatatctatggttatatgacctttttaaaaagggagactgcacagatactggccctgtgtaaggcatctgattatggccatctaaaagatttgctggtacgcctttatcaaaaacacattgaaggaatacaccagtatcatgattcactgcctccgccagagcctccggtcaagccaatcccatacgagtggaattatttctcggaacgtcctctggtcaattttaatttggccatgaaactgctccgccaaatctattcattattgggaaaccaggaatatcttccctccttttctactctggcgaaacagtattctgtaccattcatcacggtccgccgcgccgtgaaaattctcagcgacatcggaattgtagagaccagcccgggaaaaggaacgcgggtgctggtaggagtggataatccggctccgatttccagtttttccactcctaatttgaaaaaggctctgctgcaatatctacagagcatgcagattatcctgatcatctgtaaagacgcagcccggtctgtttttccttcgcttacagacagttctattcaagacagagcctcctggctgaaaaccattgttatttccggagattactatatgacgttcggtgtctgcttctcgctgctgagcgagaatgcacagtcaccggctttaagagagatattaggcgggttgatgcagattcagtatctgggttatccattgaatgatgtgaagccttatccattcaggtttgattcccgttcgaccacagccctgctgaaaagtctggaagaaagagatgccgatctgtttgcagaggaactgcagtgcctggctcttgatattttcaaggccgggaaagagaagctgattgccggcggcatcctggaggccgaagccatcgtgcttccgtcccttgattaaggagctcagcaatgcatccctcccgtgggaagaaggggcgggatgctccctgtgccctgactttcccagcctctttctatttatttccaaataaaattttacgttggcgcaggatagcaaaaatctgttatttgacagggatgcggaccaggatagccttgcagccatattctgaccttaatactcatcaaaaaaattttgtaatttatccacaaactggccaatatgcaaaccatcgacaaaagagtggtgtgcctgcacagaaacagggatcaggatttccccatttttttcataatactttccccaatcaaagagaggcgttgcctgatccttctttccagaattggtatgtgaaatatgagtatatgtgacccacggcataggtgaacactgaaatacgtcatttcctaacggtccggtaaagtattctttttgctcttgtgccgttttcaatgctgattcgcagtattccttcaaatttcccacgaaaggtaccgtgactaccttaaagagttctgtttcattgttcaggtaggtaaatgcagtatcaattttatcaaacagcactacctgtccgtctaaaaagcgataacgaaacgcttcgatttcattggcacatttacaaactgcatataccatcgccatcgtaaaagaaagtccctgttcttttatcttacgcttaaaattggtgatattggcttcaaatgtcacacaaaatgccggctcaatactgtttctgaaaataaaacaatgcatggctctatcccatgatttttcgtcaataacctgatactgattagacatagtttcatcactctccgatctgaatttcaactcagcagcccctgacacagaccgcgctgacagtaaatttcggtgccatttattttccttccaattccttcatgcctgcgatcatcaccttcaaagacaggtcgaagctctcctccactgacagcgaatggccaaaggcattgttgttcactaacagagaaaacccttccagaaatgcccgaaacgtgcggagcaggtgattacagttttcctcagagatgttcagggaggaggcgattttaaaacacatggtaaacaattcttccgtgacgctctgcgtctcgtcatcccggtatttattgtaccagagcatcgcactgaacactcctggattttcggtcgcatatcgataaaatgcccagcagaccgattcccatgcagcatatccgtcactgctccccatcgcttccagcattcgttcttccatatgccgccacccatagagcatcagctcatgatgtaaatcatctaaccccctgatatggttgtaaagtgatggcggctggatattaaggctttccgccagcgtttttagttgaatatggtcaattcccacttcgtttgctaactgtgcagccctctccaccactgcgtttttatcaagtcccgcccgtgccataactctcctccagtcttatctgataattacatagtaactatttgaaatagttttgtcaagcgttccgcctgctgtccctgtatagaaaagctgaaaccagtatcatatcgcactgccaaggctgctcttatcctgtaaaagcctgcccctgtgaggtttgttttgtctcatttaacgaatctcccttaaataatggagatattttatgatccaatcggatttccaccaattcttactaatgctccattcctccgcgtaatcggcccacgaccaggtaatagcccaggttccatccggttcctgcgtgttctctataaattcgcactcaaattcacatagttcccggttctcctcatagaagtcacttaactttgagctgataaaaaatgaaggcttgcatacatactcggcagtccacctggcggtgtcacaggtcataacatattggatctgccgctgtaacagggccttgaattctatcagatctatcagagtgtctgtttcactttctttcaaatactcatataatcttacaaaacaggatacattccccactgattccattggaaaatgcgccttaaaatagtgataggcctcttctgcaagcgaacaggctaatgcaaagaatttgctttccggttccgcatatttcaaaataaaagtaatcagactggcggttggattataagatctttcagcatcaggcgcatactcccaccacggtgcatgaggagcgtcgttgttggtggcaatggtattagcccaggtatggccgtcaaaatcctttccggatgatagatattgaaggattccctgaataattggatgatctttttcctcaaatccaatttctcgtaagatttccgcagcggcccatgtctggattggcgaagaatccggattccagcaatcaggctccagagcatggccaaagccgccgtcgtcattttgatatgaagccaatgcagtcaacacctcttcccggctgccgccttcaaataaatacttccatcgggcaagctccaacggtctcgcattcctgtaaacaaagtttctggcttgatgttcattcataaaatattcctttcccccctattcagtccggctttttcgcttatttgcctgcatttagttatgcaaaattcaggggcattccctgtggctgcgccaacgcttaactccccattttatacaatccaaaatgacaccatagaatataaaaactaaaacagagccaatgtaccagtatattgagatttgaccttctattgtattacacgaaatctgtaaacctgatttcataaaagaatacaggaatccatctgactcagcaatcatgttcagaatggggttaaatctaataagtacaatgctctttgaatcctgtcccatctggtgcataaaaatttctaaaactgaaatcaacagaaaccaaaatgtaaaagatttcaatacctttttcaagaaaaatacctcattttctaacagataatcctgttcacctggctgactaaaattggtttatagcttacgaatcgggaaaaacacataatttttctctgtctgcgggcaagtaaaatcttgaactgcaccagccagtggaatgccgttctccctcatatacccgattaccctgggaaacacagcctcctcttcacattctgcataaatatattcataaccgggaacaatccacttactccagccatcgggagcttctgcatcatcaacgcattccactcctgcaagataaagccctttgttaaaattctcccacggcttaaaagaacgggaaaaatcagtcatggctccccatattccgcggatattcccatcttcatctttctttgctaaatgctgaatctcttcaaaatgtgaatttgcatgataccataacttttgaataaagccttcaccatccagtgtggaaccttccttaccaattacgataaaagattcctttatacatctgtttactttcacagcaagacctccttaacttaacagttaccatctctgcaatctgcgctctgccggatacaccttatctctcttgttccattagttacttctttatccgcatcccgattagaaatccgatcaagctattttaattagttaattgtatgataactaattgagatagttttgtcaagccgttctgcttccgtttcctgtttcacggcggctccctcttgtaaacgatttgataaatcccggttcagccatgctcagtatttataaaagttctaaaacacttgctaatttaacagattctggatataataacctatagtcaactcagggaagatatacattgctaaaccagcgtgcagaactgattctgcaggcaacagtacatctttatcgcaatatccaggtaaactaatcgaccaatcagaagtatgaaaagcgttttaggatcatacaaggagaaagatatggagaattcgtttaatttgtcaacaataagtaatgaatataatatgttgatgacttcactgcatataagcgtcagtaaacatctgctgaatgatgattttcaggtcatttgggcgaatcgctttttctatgacaagacaggctatacaaaagaggaatatgatcagaactttcatggaagtgtgcgcctttatttttccaacgctccggaagaatatcagacaattgagaaggctgtaaaagacgcattaactgccaatcaaaggggatatgatgctgtttgcaaaatgccccgtaaagatggatcatcgatctggattcgtttcataggtacttttacaaatgaatccatcgacggagtacccgttatatatgttgtgtatacggatgtgaatgatttggtaaatgcacgaacaaaagtagaaaaagaacaccgtaaatcacaaaatatgttacgaaaggaactgcagacaatggaatgccttaaacgtatgtatggctgtatggatatggcagaatacatgaatgatatcctatatattattggcacatttttagaggcagagcgggcgtatatgtttgaaatcaacgatacgaagatggactgtatctatgaatggtgccgcgcagatatcgttcctcagatggactattgccagcgtatggatattaagctgctcgaaccgtggtatgaagaattttgtcagggaaaaagtattgtgattcccaatgcagacgccttgaaagaagaaaatacatatacgtttgaggtactgcataaacaggggattcacagcatggttctatccccaatcgtaatgcatgatcagctgacaggtttcattggcgctgataactctaatgtagaattactgatgaatacttcaatgatggaaacattaagctatttcattggtatttctattgaaaagtcagagttaaatgataaactgatttatcatagtttttatgatgaattgacaggcgcctttaatcgtaataaatatctgcaggatatagagaagctttgtcaaagtgacagcttcacttccttaggcgtggtttatatggatatcaatggcttgaaagacatcaatgatcacatggggcataagttcggagaccagatactgatcgagggtgcagagatgttgaagaaagcattccctgcgggtgatatctatcgtctgggcggggatgaatttgtcgtgttaataaatggaattagtcaaagcgcccttgaagaccaggtagtaaatctgaaacattacattttgttaagcaccaactgtaaaggtgctgttggttctatctggacagataaagtaacggagatagacagtaaaataagtgaagcagacgaattgatgtacaaagataaaatggatttttaccgcaaaaatccaacttcgaatcgctatcgttttcataacgataccatcttgcagttctccgataaaagtaaactggaagaagaaattgcagacgggagatttgaagtgtatctgcagcctaaagttgatttcaatcggcatatcatcggtggagaggcgctgattcgctatcatgaccaccagggaaagcttattatgcccaatgattttatcaattatttagagaacgcacgaggtattcactatattgacttttttgtttttgaaacgatctgtaagctgctggaaaaatggaaaaaagaaaatcttttgttaaagccggtcagtgtgaatttttcccgctatacgctgcgcattccggaatacatagagatgctgaatgcaatctgggaacggtatgatgtagataagtccttactggaaattgaaattattgaaaatgatgagaactatgacaatgattttttgatttccatcattgataagattaaaaaagccggatttgccatctctattgacgattttggttcgcgctattccaatatggcgctgtttatcaatgcggacctgaatacattaaaagtagataagcgcttaatggatgatatcgatcataataaacgctcgcagatgctgatatcgtcacttgtacaaatctgccacagcctgcatatgcgtttgatcgcagagggcgtggaaaatgaaaaacagttttccatattacaggaacttggatgtgacggtgttcagggattcctgatcagcagaccagtccaaatagaacaatatgagaatctctttttgaaataaaatactcagatatggctgttccgggtaagtaccccggcctgcatcctttcatcaaccaacgatttgcagaaaaaaaattcaatggacaagttcttagcagtgcttctctttgtccattgaattttttcgcttctaatgatttttttcgcttctgacacatcagtatacccggttattttagtttaaactgacttaccagacttgacaaaatatgcgcctgcacagacagctcctcgcttgcagcagcactttcctcggcagtagccgaattgttctgcactacatcggatatctgatttacactctgtgtcactttggcaatcgagacagcctgctcgctggatgcttcggaaattttgtcaactgcaagtactgcctgtttaacactttccacaacctctgccagcatatttgcagtttcgtctgccagtttcgtccctaaatttacagcctgaatcgtctctgcgatcagagcagccgtatttttagacgcttctgcagatttttgggccagatttcgtacttcattggctacaaccgcaaacccttttccgtttttgccggcatgtgccgcctccacagcagcattcagagcaagaattttggtctgaaatgcaatgtcctctatgatgttgagtactttctctattttgccggacttgtcactgatatctcccatagcactgatcagctcctgcatttcccggttgctttctatcatttttattccggcggtttcagccagttcgctgccatgacgtgcgttttgtgcgttctcgctgacctgggctgatatctcgttgatggaacctgccaattcctcgacagcagaagcctgctctgttgcaccgccggcaacagcctgtgcaccagaagagacctggctgctgccggcaaaaatctggtctgatgactgactgatctgcaccatcatcaggctcagcttttctatgatctcatccatagaaactttcaacttctggaaatcacccacgtaaagctcctctgctttggaatcaactgtgaaatcaccgctgcctaaagcagcaaggccatagcccatgtcaccaataattccctggaatatatgtattagagaacgtatactatcagacaaattccccagttcatcctccgcataataatcgattgacacatctaaattacccgacgccagtttttccgctgcggttcggatctcctctacaggcctgcggattccattcgatatatgaagcgctaatgaagcagccagaatgatattaagtacgatgattccaatgacaaccagcatgaaaattctctgcagctgcttcccctgatctactttttccttggcattcctttccgcctgtcctgaaattttatcaagtgtgtctgatatttgatccaacaatggtatatagctggctttcatcaaggcaaatgcttcctcatttttctttgcctctaccagatcaaaaacctgatcccgataaacgatggctttgactaagatggaatccacttcatccatcagcgccatatcccccttaaagcgttcacgaatcaccggaaaggccgcccgcatattggccagtgcggccgaagcctgatccagtgcagtctgcatatcatcgtcatctgtctccagaatacctttcagaatgtctgccctcgcatactgcatctcccgtttcgcagtccatgctttgactgtcacagcataattattttcataaaaaacggtcagattcccactgattcgatccatcataatcagtgcggccacactggcacttaagcctaacagaatgataacggcgtatgacagcagcattcgtgttctgatctttatattcttcagcatttaatattttcccctttaccaattacatcacccctatgcggtgaaatctgcagcggtgctggcagcatttcttcctcgaataggctataggttatattatattcttcctctgctaaattatcaagtgttttcagtcgattttatggtatactaaaaccagtttatgctgctattcacaaagtgatcaatcaccagcatatttataaggaggtatacgtggaacaggaaagtctgctatataaagtgctttatcaatccattttgacacagatatacagtggggttctccgctgtggagatgtattccccagccagagcgagctttgccagcggtatcaggtgggaattactactgtgcgaaaggtaatccatatgctgaaggaagaaggtgtgatatgtacctccgctggtaagcgtgccatcgtctgttttggcgagagcgaaaaaggttacattcagtcattgatgcaaagacgtgaaagcatattggatgtttaccgcggccttgaactgatcatgcctcccctttatacagaaggggcgatgcactgcggccgtttaagcgtctttgcggatgctgaaggttcttctgatgaccagatgatcaatcgccagcgcataactgctttttttacagagttgctgctgccctaccgcaaccagactgtgctggatcttcagaccgacatggagcactatgcgcgtttcccctatgtcatgcagtctcaattagaagatccgttcactgtatcggcagactttctgaaacaaaatctgtccattatgcaggggatggtggaacggaaagagagggaatccctgattgccaaactggaggagatgtatagaaacgcaggccggcaggcggcagtctatttaaatgacttacagaaaatcgtccctgtcccgggggagccggttacctaccaatggttccgagggaaaaaccgctctccgctttatgctgctgttgcgcaaagcctgtatcggcgcgcccagttaggtgaattcagtcatcgtacatacttcccatcagagcctgaaatcatgcatacgtacaagatttccaaatcaactgcagccaaggcgatggctctgctaagcgacatcggactgatccatactattgaaaaaaaaggttctgtactgcggacatcggaggaactggcgcctatccgcatagagcaaaatatcatcgaaaacaatctgactctttttttaaatgtcctgcagattctggctgtctgtaccgggaaactttcctttgctgcgttttccctgctggatgattctcagcttgcggatacagcctctgagtgggagtcgagtcctctgagacagagaagttccggtattatacatattattaccgctttcctaaaggcgcatatgccgcagaaatgtctggaaaatattcttgagcagtttgacgacgccttaatttggggccattatctggaccgcccctatatattggttgaagaatgtgcggctttggcacaggagggctttgaacagtttgcgctttcctgccagtcacttagaaaaggcgaccgtgaaagtgctgccgcctccgtccagcgcacgttccgggccatatttctggacgcccggttatatacactgatttgttttaaaaatccagataaagttcccgctgagatataggaggtggtggagggggaagatttcatctcaatttcttctcattatctattttcacacactcaaaaaaagacttcggggtgttttcccaaagtcttttttgagtgtaacatgaatgttattaagttcattctgtcaagtgaacctcattaatcttacctatttctcatttccgtcccatacaccgttcccgtccacgcggtatccgtcaggagtcactccgtttatcagacagcttccatccggccttaaataataccactttccgtctgcttccagccagccgactgccatgcttccgtcaggctttaagtaataccagttgccatttatgaactgccatccagtaagcatggctccgctgccgccgctatagtaccaggtttgatttaccagggaccagccggtaatcatgatggaattatcaccgaataagtaccagtcttctccgatcttcagccattctttttgggcatatccttctttgtcttttaagaatttccacgccccgcttccctgctttttccacaggccatgcccttctgatgccggtatctgcccattaagtatcggatatgtgttgtctgcctcctgtccatcgtccccggactcttctacggaagttctgacgaaaacggtacagacagcggtttttcctccatgatccaactcacagtattccacagattgtgagcagctgcgaaaaagtttccatgctgtaaacggctttttcgtataatgcggcgtcgccaattccagcgctgtccattccggctctgcacgcggcctcaataccggctcttgcgtcttcgacgacaagacagcgttctggttcagcctctgcatactgtgccgccagaagaaatacctccggatccggtttcgaatgtgtgatgtttgttccgtctgaaacagcatgaaaatagtctccgagaccaatctgttccagaatcttcttcgcatttttactggaggaaccgatcgccagctttatccccatggcccgaaggccgtcaagtgtatccttcacctctttgcttaaatcggctggtgacatctcatctaaaagtcccttgtagatctcattcttctcagcgcaggcccgtcgtttctcctcggccgtcaatgtcgtaaggccgccgtgctttaagataatctccaggctctcctcccgggacacgcctcttaaaagattgttgacctgctcatcaaacggtactcccagccggtccgccaatgccttccacgcctgataatgatacacgtccgtatggcagatgactccatccagatcgaaaattaccgcgtcatactgtggtatactcttctctctgctgtcctttttgcatccctctgtctccctcagtgaaaactcagaaactcccgttaaagaacactgttttccgtaaacagtcaccgtctgcggctttccttccaacagagacagcctgcatcccttccgattgacctccaccgaaattaagcttccgagataaacaatttggaaacggcaggcattccatttttcaggcagatatggatccaggaacagcccctgctccttcactttaaggccgccaaagccatagacaaccgccatatagacgccgcccatgttggctgtatggattccatcacccgtattatggtgcgtattaaacagatccatctttgccgagtctccgaagtagccatatgccttttcttttttcccaagacgtgaagccatgatgctgaagatacatgtggatagagaggaatcgtgagtagtgatcttctcatagtagtcaaacgatttctccattgtctcccgtgactgcaggtcctcaaacagcacgtgggccagcaccgtgtccgcctgcttacacacctgatggcggtataaatacagtggatgataatgaaggagaagcggaaaattttccctgggcgtatgatcgaagtcccaaatctttttagacagaaacgtctcatcctgcggattaatccccagcttttcatcatatggcaggtacatggcctgctccgccttccggaaaagttctgcttcctcatcagtcaaaccgattttctccgctaccgctcccaatgttcccgcctctttcaagatctcccaggatcttacagcccagtgaagattgtactttgcacacgcatttgtatagtaattattatctaccagacacgtgtattcgtccggccccgtcacctcatggatctcaaaacggccctcgtggaagtttccggcatctatccagagtctggctgtctcaaacaggatctccgcccccatgtccgcgaggaactcccggtcttctgttaccaggtaatacgccgccaccgcataggcaatgtccccattgatatgatacgcggcagttccggatggaaaataaccagaacactcctttcccataatagttctccatggatataacgcgccgctttcatgcccggcgatccgggcgttcttcctggcttcgtcaagcgttctgtatcgaaatgacagaagctttctggagatatccgggtttgtcagagtaaaaaatggctgcatatacatctcggtatcccagaagtaatggccttcgtacccctctccggacaaccccttagcagcaatattacagaattcatcccgtcctgcggactgaagcagctggtagagattgtatcgtactgccacagcggtctcttcatccccgtcaatatcgagatctgaatgcctccagaattccgtcaggtactgtttctgtctttgataccagtattccaggcccttttccacagcctcattcatctcatccatagcccatgccaatgcatccgggcgacgcacagagtccgtaaacaccgtgtattttgtcatggaaatggtctctccggccttcatatgaagcgaatacgtccgggtgatccggtgccctgccgtctccctcgtctcctttgcctggatagaaaggcggtggcataccgcactgcaggccagcagtcccgaagctgcggcggcagtgaccagacaggaaacatctccctccacggctgcctttaccgggcgaaggtgagagatgctttcccctgcgactctcggatcatccggattacaataattgctcacttccccgttatgatccgagattatttcggcttcgccgctgtaatttaaggattttacctgatattcaatcgtgaacagcggcaatttgacaaaggaagccatacgccggctggtgatttctacctcttttccctggggagaacgccagaccatgctgcgttccgtgacacctttttccatatccagacggcggcaaaaccgaaggacggttccctcaaacagggaaaattcctcactgcccagttttagacggattgtctgggtatcggccacattgaccatggtctgtttttcctcgacaaagccgcagagtttttccgcctggggcattttcacaaaatcataaaatccgttgatataggagccccggatggttttctgtccctccggatacccctcttcaaaattagaccgtacaccgatatagccgttcccgttatggaatacggtctcgtgcagtacgcagctttcctcatcggggctgaacccgtctgcctgatagacccatttgctcatggatgatctcctcctttttcgattttactgtaaatacctgttttctcaatgcaaagcacacggccagtgcggcggcagtcatggccagccagccgaagatcgtcacctgccagcccatatgctggaccagtacaccaattccataagtagaaatggcgcaccccaggtaggccatcgcatttaaaaatcccgaaacggtagaaactcttccctccttctcgaaatgaagcgggagcagattgacaaacagcgtattgaccgccatcatggacgctgtaatgacagacagcagtcccgccgtcagaaacatattgactgcgctgaaccgccagagcaggaccagcgcgccggtggcaatgagaaagaaaaaagacgccgtcttaacctcctgcttctgaaagaatctccggtacataaactgagcggcatatgccccggtcaggttaatgaccggaagcatggtcgtcaccagcacagacagcgttggcgaggccataaatgtttcactgatataggttgggacccaggaggtcacaccgtcctttaaaacgccgtgaaccaccactggtatcaggagaaaaagaaggccggatgcggtcagaagctttgcaaacggcatggagccgttttctgcttccttcctgcgttctcccttcttttcatatactgccgcattcccacgttcatccccatcgccatgacacgcagaatacgcctcaaccattttgaaccctcgccggaataccagcgcagaagcgcacatgcatacagcggcagcataaaacacaaaccgccatccggcagccgctatcatggccgcagacagcagatacgaggccagggttcccactgccatggtggaagtgatatgcacgcagtattttacctttctttcctcggtcatcatctttgcaaatattctcatgatcggaggccagatcatcgcctgagtatacccgttagcgcaccagaacagcgccatcagtccaaatcctgataagaaacccatggccatatttaagagaccggatgcaaacagcccgataaaaatcattttccccggatgaaggcggtccgccagcataccattgaaaaactgtcctgcaccataggcaaaaaagtagaccatactgataaatccggcctgcgaggcggtaatcacagatcctccaatcatcgccggcatggctgacgaatagttaagcctgccaatgtaggaggcaaagtacacaagccagcacagccagaataaaaacgcctgcatagggccgtcataaattcgatttaattttttctgcatcttctctctcccgtctttcgtcctatacttctgctgtaaacccgtcgtaggctgtcagaaagccctctggtgccgccagccgctccatctcatcatgggaaagtccgtggccgcagttatgggagaaatgattgaggatgaacacggtgctgtcatggacacagcccatggcttccagcctctccttcgttcttacgtccccggcccagcccatgtgagtcgccccgtctcccagaattcccatagtgcagtcaaggctgaccaggtccaactgccggccgcgcagatactcccacgtctcctctggaaaatacgccgtatcatttccatacagtaatgttttccccgcctcatcctcgatcagaaagatcagacagcactccgccggatcatgggcggcccggagaggcgtcacacggtagtttaagatggtaaatggctgaaatgggtgaatttcagtgagcgttacgcagtcatccaggttttcacagtcatcatccacctccctcatgcgtttatatagttctccaatccgctttgtcccatagacatgaaacggtgctctgctcccggacctggcatagggcctggctttcatcatcaggtccgtggcataaaagtgatcgcagtgcccgtgagtcacgatacagtggttaatttcatgaagcttcagaccgtctctgattacatgcagatatgtatccggcccaaaatcgattaacagtctgccatccaccaccgcctgggcgcgtgtccggatatttttaccgcccagctcccgcgccttttgacaggatgggcagtcacagaacagcgccggccagccttccgcagccgcagttcccaaatactttattttcatggaatcctctcctttccagcggtgtaaaccgccgcatgactcagcccttgaccgccccgttggtcagcccgccgatgatctgtttctgcagtaccaggtacaccagaaataccggaagcatggacaggataaaggttgcaaacaccagcgcataatccactgtaaatgtgctcttaaagttgtactgaaacagcgtcagcgtccagtacttcgtcgatttattcaataccagcagcggaaggaagaaatcgttccagatccataagcccatcttgatcagcaccgtggccgtcatgggttttaagagcggcaggataatctggaaatacgtcttggctgtggacgccccatcaatataggccgcctcctccagctccgtcggtaccccctggataaacgccacatagaggaacacgccctcgcagatggagctggccacatacacgatgataattcccgtgggagtcagcatgtgaaggctgctcatcgtcttgattaagggcatcattttcacctgaaacggcacgaaaatgccgaccagcaggaaaaaatagagatatttataaaaacggctgacatccatctttctggcaatagaataggaaaccatgggaagaaccacgatcataccggccagagacagaatcgttatgtataaggtatttccaaccgcctgataataatcgggacggctcagtatatttttgaagttccccaggtaaaagcgttccggcagtgccaggaaattctttgtaatctccggttccgtcttgaaggccgaaataaccgttaaaaacaggggatagatgatgagcaggataccgattatcagaatgaaatacgtaccggctgcccgttttgtctgtattttcataggccctccttcctaataaacttttttcttattgttgacggcaatctggataaaggaaatcgtacacaccagaatgcacagaataatggattccgcaataccgtagctgaacttcatttccttgaacccgtgattgtaaatgaggagtgctacactctccgtggctccggcaggtcccccctgagtcagccccaccacgtagtcaaacagcatcagaccgtctttaaacatgagaaccaccaccacggtcactaccgggagcacgaaaggcagagtaatctgtttaaacagctgccacttattcgcgccgtccaaagaagctgattcaatcagctcctgaggaatcgactgaagccccgccatcaaaagcacggtaggtatggccacactctgccacacatggacaaacaggattccgtatttcgccaggctgggattcgacaggatgctggtcttcagcacttcgatgttaaaaagatcgccaatccccggcagcacccggtaaaagaattcattaaagatcagtcccgcagtcagcatactgatgacggccgggaaaaaataaatggcgcgaaatgccgatttatacttaatcttactgttcaaaagaagcgccagcaccatgctgatcaccagaaccagagccaggagcatcagcgcatagaccagggtaaacaggaaggagccgcggaaacgcgcgtcctgcacgatagaaagatagttgcccagtccgataaaatgaaacttcttcgtgatcccgttccagtctgtcatgctgtaatacagaccattgattatggggtaaataaaaaacatgcagtagagcgccaccgccggtatcacaaacagaaacagcgtgatatccctgttgtttatctttttcttactcttcataaaaaccctctcttttttgaaagaaggtgctgtgcctgcttttttaagcgtgaacacaacaccttttgttttagagcgtattcaaaatctgctctaggattctttgtagtactgtttgacaatcctgtcggtctcttccaggaaatggtcgacatcctggtcgatcagaagctgctgcatcggaatcgcccactcgttgcgcatgccggccggccagtagttgacaagggtcaggaaggtcttgtctcccgccatcttttctttcatcagggtcagaggctcaatatgatactccacgcctttgatgactgtaggtgttccctcattatctgccagaagctggttaatctccggtcttgcacagaattcaataaatttaagcgcctccgccggatgctccgtcgtcgcagagtatcccagggcaatgtccacattgatcggaagggattgtgcttcccctgcaggattcggaatcggtaccatggaaagattcatctcaggcgctgcttttaaaatggccgccagtccccaggttccgctgatgaacatgggatatttgttattgacaaagtcagaggtggcctgctctctgccgattgcgagagaatccttaggaccatacttcctcagttccagcatggcttccgccatggtacgcacgtaaggaagcgtttcgtccgtaaatgaagcgtcactcgttccaaccgtctgaaaatcgttgtaaacatcgtttttaatgataccgatgattcgctctgcttcctgtccgagtgcgacagagtccttatcgttgcatgcaatggctgtaatgcccgccgcctcaaaggtctggcatgcctgaattaagtcttcccagctctcaggaagttccagattctgttcctcaaacatatccttattacagaaaatgccgaatgaactgagggcaaatggcatggtatataccttgccgttatgctcgcacatcttcacggctgtggcctccgcattatcaagtactttctcgccggtcatatccgccatgatgccttcatccataatgctcttatacgtcgcttccgccggatagacactcatgatatcaggaatatcgccagtggaaatattagttaaaaatacggtctcggaatctgccggagagatctgattgatcttgacaccgggattttccgcctcaaattttgcgataatctcatcataaattgatttagcttcatttttcatctgaaagaaatccagtgtgacagatcccgccaccgcttcggagctctctccatttgtattcccggctgctccgccgcatcctgtcataacgcctgctgccagtgcagctgctgataaaactgccattatcttacgatatctcataaccttttctcactttcccttttttcaaacgtgcacgtttttttgatgatctaatcataatcaatttcagacggaaaatgaatacccctgttttatatttcttaccatttcttcacatcctcactccacccgcttgcatcctgccattttctgttgctataataggtctgtaccacaaaatgatcagattggggaacaccatgaaaaagaagatctcactgaaacatttaggagtccgcaaacgtctcttccttatattgtttttaatcgtcctgctgatggcaggctgcttttcctatatctttctaacgcttcgcagacagaccagcgcccggctggacactgccgcttatcagacggctgcgactctgctggagcaggcctccggcaaggtggacacactggataaggtaacttcctatcttcttcaggagcattatcagaataatggatatggctccatttttccctatttatcggattacgccacttcagaggaaacgagtgcggctctctccaaaacatttaccactgccacgagaaagctcttctacttattttcctccctggaaggcctgtatctctacaccaatgacggtgaacccatcatcttcgacagcagggacttcacccggttaaccgccgcctctctgacagaggccccctggcgtgagcatgtcatagaccggaaaggcaggcttatgctgctggaatcggaccagatcccctctgacttcaataaatccgagggagacccctccggcagaacctccaggcactatctctacggaacccgggtcctcatcaaccttcgcagctcctttgcacccttatgcctcgtcgtggcccagctggatatcaatgatctgcaatcctcatttaaccgcctgcattcgtacagaggccagtcctacgccctcttagataaggatcatggcctgctgtcgttctctgacagttttccactggaaaccatgtccggccggatgcctgtcgccggagcctccggagcgtcatccgaggcagcatatgcttatgagacttttagaggaagcggctatttctttcatatggtaaccgatcattctaccggcctgtcctgtgtgatatccactccggactccgtaatctcctatatgccgctggtaatgatcctggtgtccctgctgttgctgctctttctgattatcctcttcgtccagtacaccttccggggaatctcgaaaccgatcgaaaccctggtatccgcctgcgaagagatcggacaggggaagttttccgtccgcgtggcgattccgccggatgtggaactgggttatctgaccagctcttttaaccagatggccggacaggtggaacacctgatcaatacggtttacttaaaggatattgcagaacgggatttagagcttcagatgctccggaatcagattaatccgcactttctttacaatacgctggaaagtatgcgtatggctgcctacacggaaggggcccatgacatctcccagatgtgcctgctgctggccgatgtcctgcgctacggagtctcttcaccgaccgaactggtgactctgaaggaggaaatcgaccatttaaaggaatacatcacacttcagcagtaccgcttccactatgccgtgaagattaacgtcatggtgagccaggacttatatgaatttctgtcattgaaactcatgttccagcctcttgtagaaaatgcactgaaccatggatttgaggggtttacgggaaatgaacggattggtatctttggatatcagaaagagggagtcctccattttcaggttacagacaacggcgtagggatggcgccggaacaggtggaggctttaaacggttatatcagaggggaaaatgagaaatttacaagcattggcttaaagaacgtgcaccgccggatcgagctctattacgggaccggctacgggctgactattgaaagccaggagggacgcggaacctcggtctgcattaaaattccgcttacgtccgcaaagtctcataaagaggaggaaaaagatcatgtataaaatactggtggttgatgatgatcccaacattcggatcggactgtccagaatgattcagaacgcttatccggacacggtcatcacggacaccgcggaaaacggacgaattgccttcgatcaggcagtcaagtttcattttgacgccatcatcaccgacattaagatgcccgtatggggcggtttggaactgcttacgcatttaaaggaagaatacgtaattcctccgaccctggtgctcagcggatatgacgactataatctggtccgcagttccttaaagctgggagccatcgattatctcttaaaaccggtcaatgaaggacttctcttaaacgccctggattcagtctttaaatccctggagatcaactccctaaatccaccggccatagaggctgacttaaagaatcagattcttttggagggcttcttcggatctgccccggtagacgaggagaaagaggcgtttctgacgcacagccacattacccgggatactctatgccgtgttctgtacgtcgatatgtcccacggcctctattcccgcaaaaaaatcatccgtaattttattgagacccgcttcgagtcctgttttccgccttcgtcttcctactgtccggtatacggtgagatcggccagtactggattctgctgctctttgagctggcagaaaacgccagatgcgcggcacttacagccgcatttctaaaacagctggaagacgagggactcttcgtgagcgccagcttaagccctctgcccctgtccgacttatcctttttaaaggcggaatgcctgcggggatttgagcggtatttcttcgatctgccctatacggctgaatcaaaagagtggactggctcagaggaacaggagcttctggacttaacaaccacagccctggcagaatacgattatgccggagccatcgaacacctttcacggctgtttgcgtactttaacagccggcgccctccggttgctcatttacgccgaaccttatccaatggtatttatgacctgatgggacgcaacgccaacttcatccctgttgtcagccagtccagtctgacagactatgatattctggcacaaatcgaagatgcctccagcttaaaagagcttcagacttccatgtttgccacgcttaatttttatgtagaaaaggcaatggattcccttaataataaagaggacttcgtcattaagaaagccaaggaatatatccggaataattacagggataccattactcttaacgatgtgtctgcctatgtatacttaaaccctaattatttcagtacactgtttaaaagcaagaccggaatcaccttccgccagtaccttcgggatttccgtatccagacctcgaaagaactgattcgccagggaaagctaaagatctacgaggttgccgatgcggtgggctatccggaaccggcgcattttgtgcgggcatttaaggaggtgcaagggattagccctacagagtataagaattctctttaaaccatgatcaatccccaaggccctcacaccctattctcctgcctctgctgtatgctgtgtaatccggaagatgataaattcagccggcctcgatggtgagattccgatattgcaaatcagccgtcccgccatcatgtcgtcctggctcatggtggaaggtcctatctccacaaaatacgcctcggacgaagaggcgccggccagcattccgtttctccacagatgttccaggaagtcagcaatcgtcttctgaactcttgcccagagagtggcgtcattcggctcaaataccacccagttggtgctggccttaatgccctgttccacaaagataaaaagccttctgacattgatgtagcggaacgagggatcgctgccggccgttctcgccccccagatgcggatgccctggcccggcagcgcgcggattaagttaattccctccggagctaagatatcctgttcggcagtcgtatagttgaacgaaagtcccgtacagctgatcgtctcgttggctggcgccttgtgaacgccccgattgatgtcgcatctcgaatatacgcccattacagcgccggacggcggaaacattccagggcatttcacagtccggtcgaactgctggatccaggggtgatacatggctgcataggtactgtcgattatgctgcgaaattcgatcagctcgctcgtcttcgtcatctgctttggcatatcgaggactgccatgcggctcttcagattttcacagtgactcacgagagagacctcgaccgcctgggaggtgatgcccggaactgccatgatactgacgaaatcattttcaagaaacgcctggattccggttcgttttcccggtcctgagtcttcgccgataaaggttccgtcattgaccaaagccagagttccgtcgctgcctccagacagtgtgacgcttccgtcggatacaccttcgcccaggatcatttctaccggattcttccatttatcttccggtgtgcacgtaattttaaccagtttgctttttcccatccgtttctccacataatcgggggaagtctggtttaacgtcattccctcgtagctttccacttcatcttcatatcggacagaaaggtcgatctccagggaggtcaccacattgacaggcacaatattattatcgaccggatttaccgtaaattcttcctccatggtgatttcgccgccatagactgccgcaatccggtttacctcgccgtgaaacgatacgagatctccctccaggaagcccgcaggcgattttgcacggtaaaccctgtccccaagcttttccaccagctgcatctttttccggcagctggtggtcaccgatatcataattttattgccccattttccttcgtcaacggcttctgcggtaagaattccgtaagtaccggctgccttttttgcatccggcggaacgacgcgagccacgaagcagcgggttcctccattgacaaaaaactgttctgccgcgaatgccaggtagcgatactctccgtaggtgatctcatctaaatatccaccgaactgcctctgaaagtcagcaaagtttgtgaccagggagggtgccccacaagacggccccttcaccgccattcctacaaatcccgccgtacttgttccgacgccttccactgctctgggagaattatcatattcctccacatagactcccggtgataaatactctgccattctgttctctcctctcgagatatttgattgatccaattttcagtctcatctgtccggtgtacttgacggtgattccccttctatggacattgtcccggtgtcatacgtgtcaaaatgaatactccgctccttatactccccctcattcccctgtgtaaaggtaaaaatgacttcgtaatcaccttcctcttggaattccggcagggcatctccgcaggaccagctttcttcaaaaaagttccaattatcctgattatttatcacattatttattaagagtccattttttccatattcagtgctgataaagccgtatgcttcatattttccactctctgatctgcaaaagaatacgagggcgtccttttgtccgtcctgcattccgctctcataatccactgctccgtctaatccctggctatctgcaatcgaatacatcacatctatcaatggcagtggctggctttctggtatcgttccggactcgctgttttgttccatcatcgtagtctctgccacctgttctttattttccttattgactccgcagccagccaaatatggcatcaggaacaataccgcagccgtacagatgcatttttttattactttcaggcttatagataattttataataaacactccctttcaatcttttcaaagtatctatgcccgccgatatgatcccagtgaacatgagtagtcatcaccgtgacaggcagtgaagtcaggctgtcaacaatttctcttatattgccaactcctaatcctgtatcaatgaaaacagctttttctgtcccacataataaatagcaatgtgtctcttcccagtgcttatattcgctgatcgcaaaggtatcactgtcgattttttcaacggaaaaccaacttttgatattcatacatgtctcctaaaattacgatatggcggctgtcagttcagccgccccaaatctttaagtccatctccaggcaaatcaggaatttatttcttttttaattcagcaatagcgccataatgcaaaatgctaaattctggaggggcgattttattaagaagttccatatgctcctgttcccacgccgcaacctctgcatcagtaagtgaagctccaatcccccggcaggctttcattcttccattccagctttcacgggtaaaaggaacatccagaggatattcctcatgataaaccaattcaaattcttcactgtagcaagcaggtatctgtattgggtgaatcgtttctcctgccccgctccacttagggctgtatctcagcacaagttcctcactggctcctgctattttatcttcaaacggcagccaggccatatatagtacaagaatgcgtccatttggtttcagcatacgagaaagggccggcataatctgttcatgattaaaataccagaaacactgacaagcagtgattacatcgaatgaatggtcgggaaaatctatgttttctgcggataatccgtaatagtcgatatccatgccctgtgaaagaatttttgcctgtttaatctgactttctgaaatatctgtgcctgtccattttgccccataacgatacatatttcttggcagtactcctgtacccgtacccatatcgagtatactctgaccgcttatacataatttacggtctatgattttatcataaaattgctgcggataaatatcgcggtactttgcatagtcttccgaggttttactccagtcaaatgccttgccgccatctatattctgatttgtgatgctcatattttatacctccaaagtttatggaataagaaaattcactcatgtcccggcaaaagcgcacgcctgccggctatgcctcagtacaattaatactctggccggctgacatgaagtttaaaacggcttaccctgctttttagaacctgagactgtccgtagagctcttcggacgcggcagccgactcctccgctgtggcagaattggtctgtactatatcggatatctggtcgatgcctgtagaaaccatttcagtcgcggccgcctgcctttttgaagcctccgcgatttgatttattttagatatcatctcatcggtaccgccagctatattcctaagcgaggctgcagtctcctccgctactttcgtaccataaactaccgcagcgagagactgctcgatcaacgcctccgtgctcttggaagcatcggatgatctggttgccaggctgcgcacctcttgagccaccacggaaaacccttttcctgattcacctgcccgtgctgcctccacagcggcattgagcgccaatatattggtttggaatgcaatatcatcaatggtctttatgattgttctgatttgcgttgaattctgatttatcttttccatcgcatttttcatttcctgcatctgctgattgcaggccagaatattcgcgcccatttcacctgccgctgtttttaccacctgtgaggtttccgcattctctttcacctgctgggatatctctgacatggtcgctgccagctcttccaccgagcttgcctgcgcaataaccccctgtgaaaggatctgtgcaccattcgaaacctggtcggccccattggcaacctggtcggagaacatattgatttctgaaatggtctcattcagagagttaagtacaatcagcagcgattcctgtacaggcagaaaatccccctggaaatcgtcatagtgcggtatttccagattgctgtcagccaactgccgcataaccctggaaatcgcatccatgtaataggaaatcttgtctgacatctgccgcatactgtctgaaaggcttcccaactcatcctttgatgcataatttacatcgattttcagatgtccctgctccatctgccttgccgcagcttccagttccttaatcggcctggtaatgccgcgggtaatataaatgccaaaaaacacacttacaagtacgctggctatccccaatacagacaaaatggtaataaatttcgtctgcatggcatgtagatttacaatcagctcatccgcttttctgtccgctatttcaatcagttcatccagttccgcctgtgctttgtggatggttatgatattgtttgcttccatataagcagaggcttccgccttttgattctgtactgcaagctccaggacatgctcacgctgtggtgcaagttcgtccagggctgcctggagccgttcaacaattgcctggtctcctaaaaaatctttctgaatgacaggaatctgttcctgaatttttctttcccatgccctggcattctctaacgcctgctctgtattcgcctgactggtactggagatggcacgaaatactgatttctgcatcgcctcaaagctggaattgacagtgttcgccgcattcaggactcggaaaggaccattgtagaacacctcaacttttgacctgatactgattaaattcccaatactcacgacaatactgataactaataaactcaaaataaatccataagaaatcgtgagttttctactgacttttaaattcttcatagctctctttcctcctgttaccggcgattacgtccagccatcaccctgacgcttcatctctgtccgggactttttcaaattccatttgaccggaatcattccatttattccgttccatcatgaccagactgaatccaaacagaggttcccagcatttgttccttctttaataattccaaaaacgattccgcgctcatcggtttggcaaaatagtagccctgtccatagtcacaatgatattgatgcagcagatccagctgctccacggtctctatcccttcggctaaagagcgtgtcatgggcagttcacggcagatctgcatcgtatttttcatgacaatgcggctctttgcatcgctgcttaatttatcaaccagggacttatcaaatttaatctcattaaaatcaagtgtggtcaaaatagaaaggttggagtatttcgaaccaaaatcatccagggaaaccgaaaagccctcagccacaatctggttcattaaatcaattaattgctgcggctccaatttactgatgctttccgttacctctatggtaatcttctccgcggggacttcatatttccggcagatctgtttgatctgcgtcacaatatcggaggccatcagcgtgacacgggaaaaattagaggaaatatgggtatcaatcccctgccttttccagttctgccaatcggcacagacggtctcgaatacaaataaatccaaatggcagatgacacgctccctttcatagtgagggataaaacggtccggcagaattaaagtcccccgtttgctccattttcgcaccagggcttccgcccccataatccttccggttttcagacaaatctgcggctgataataaaccccgaaacgatggtcggcaatatcccttaaaagctccgtggcaatgccggcacgtgccattctgtccccctgcagaacggcatggtaataccgctgtttttctgcatacattaaatcatcggccttcaggatttcttcatcgacagatacattgccttccttccaggtatggccaatggatacgtcatactctttgttcctgtcaaaatcccggatcagcttctccgtaagcgtctggaagtcctgctttcctatatctgcgcagattaccgtaaactcatctccgcccacccggtatgcagaattctccacccgtgatttcaggatatctgccactttttttattaccctgtccccatacttatgaccattgctgtcgttgattttcttcattccattgatgtcgatgtagataacgcccagcgaacgcagggtctggtgagaaagtctgtccagcatttttatgtagctgttccggttttgcaggccggtgagtaaatccgtgtagctgaatagctccagattctgaatcagcctgcgccgttccatttcctccagcacaaagctgcatacactgcgaagcagcgataggtcacccgtactttccatgggattgtcaacaccaagaaagccaataatctgaccatttttcttaagcggagcggccgcaaggctctcaattccctggtcttttaaaatacggtaatcaggggaatctacctccaggtccctgtccagcgaagtaataaaaaactccccgtcaagctcaaatttatggttccaatcccggatgtattctattgggatttcctgcaggagatccaattgaggctttatattaggggcgcaccactcaaatgtatttttaatttgattctttctgtattcaaagatatatgcccggtcagcggcataaaagcgaccaataatctctaaaaaacggttcacggcagcgttgacatctgcttcactggaaagtgtctgaatacaatccaccaatgtttcttccactgtaagacggttcgaaacacggtcaaatttttccttttgggctgtaacatcccgtgcaatctcaagccggcagtattttccttcatacatgaccaggatatctgtaatgtcaaaacacatctgaagcttttcattataatgctcccaatgatatggctggcctggaaccagcttgctgttggtacaaaagggacagacactgtccagcccctgtatcagctcatagcatttcttcccataagtgtcctgtacatgctcaaatccatagagggaggctgctgcctgagtcatatatataatctcgttagtatccgtatctgtcgcatacgccaccagattttgctggttaataattaatcgttcaaaaaaagattctctcacagtatacctcccgaatcatcagcacgctgatcaatcattgtatttaaatgccttctggccgttattcaattgttcactctgatcagcacgcttctgttacggccgtttcgcttagcctgataaagcgcgtcatctgcccggcggatcagatcatccggacaggtatcctctgttgtttggaacacagcgccaatgctgatggaagttgtaaaaatgtttccctgatattccatctgcatatgcggaatctgctctacgagacggttcagtatctgcgatacaagcccatgctctgtctcatacagcaggaacaggaattcatccccgccgaatctccccactaccgtgcctgccggaagcagctccctgacccgtttcatgacacacttcagggtcatatcccccgcctcatggccataggtatcattgacattcttgaatccgtccagatcaaggagtcccagaacgacagagtctgctcccgttccttcctggaactgtcccgacaggatttctatgaagtactcgcgggtcagacagcctgtcagggcatcatagcaggcctgttttttcagccgttcaatgatttccatagtacgcttcagttcacgcagatcccggctgtaggcaataataatgtcttcatcattgtttccaatgaccgccttcaccagtgtgacctcacatgggatgctctctccttttctgtttacatagacccactcaaaaacatagcgcctgttattttggatttcgctcattgtccgttttctcttctccacgctgacagatccatccggctgatagaggggcataaagctgtcaaaatcatgcagaacctcctctttatccgtggcccccagcatttcaacggctacctggttacagtccagcgcttcctgccgcatattccagagtacacaggcaaggggggaagaatccaccatcgcccggacgcgcctggccatcaggcgctccgccttttcagccctgagctggtcgcggagatctctggtataaccggcaaccatggcactgccgtcttcctccaatccatcgatacgcaccagcgtaatttcagcaggaatcaattcaccatctgttttttggtgcagccagtgaaactggacgcgtcccacctgcatcgcttccctgattctctctttcgccttctcagagctcagactgccatccggctgccgttccggagacagcaggttaaaatgatcgaggtattcctgctcactgtccaatccaaaaagcttcggcgcctcccggttgcacataatgttgtgaaactccttgtcccagagattgagacagagcggggtcgcgtccaacagcgccttgagccgcatccggaacttcgaacgtttttcttccaattcgatttccccgcgaaggtcccgggtatagctggccacaacaaaatcctcctggtacggaagccgtacggaaatcacctcgacgggaatactctccccttctttatcacagtgcagccacttaaattctgaatatccggcagcgaatgcctccgcgattttctcgtgtaccagttcaatggaagtacggccatccggctgatgcagcggcgaaaactgatagaaatgttctataatctcctcttttccttctgccctgaacagttggaccgctttctcattacaggccatgatttcagactgacgattccagagcatcaggcacaaaggggttgcattcatcatggcaaacagcagctccctgctgtttgccagttttttttggaacttcatccgatcactggaaatttccagaactttattgtcattactggaggtaagatatttctggaaaaatgcctccggctccattggtctggaaatgtaaaagccctggaccatatccgcgttgagcaggctgatcgtttcccattcctcctttgtctcaaccccctccatacaaaccgctttgccgagattatggcacagacggatgacagactccacaaagtcgtgattatactggctgatatgcagcgccttaacaaaatagcggtcaatcttcacaacatccataccgatttcggccagacggccgagcgaggaataaccggtgccaaagtcatccatggacagctcaatacgcatctcgtttaaacgttccagcgaatcattgacattggcatcgtttgttatgaagtagctctctgtcaactccagcgccaggttccgcgcgggaaggctgtacttttgcagcagcgcctccactttgtcacagaaaccggaatccctcagctgtacaaaggacacgttgacgtccattacaaagtcaggattttgctccgtccagactttgcaggcaataatagcctgttcaagaacccacaggcctacagggaggatcagacggctactttccagcagagggatgaactctaccggcgatatctccttcccatccggcatccggtacctcaggagggcctcggccccccgtacctccagggtatctgcgccgcagatcggctggaataccagacggaacccctgaaagccattatctgcactctgcgccagacaatgggaaagctggagctcgtcaagcagcccggcagtgaattccacacactggtttttcccgttttccttggcttgtcttaatgcagcgcaggctcctttctccagttccacccagctgtgtgcttcctccggataagcgatgatccctccggacaccgtgaaccgataggcgcatccgttgacccggtggggtccggaagcatactgccggatatcctcgtaaatccggagcatctcctcccgccggacatgattcccggagagcagaaactgatctccgtcataacggtaaagcttcacctgttccggaagcatctttaggatttcctgcgctgttgtccgaagcacaaggtcaccaaagctgtggctgttcaagatattgatgtttttaaaaccatcaattcccagaagcaggagctcctcatgaaagcccgccctgccctccagcgtacgttcgaatctgtcacggccggagctgtgtcttaagagtcctgtcacctgatccacgccttcatactgctccatattccgcagcgtacctacaatcagcagtggttttcctgccgtatcccgtttcattttcgcccggtcgcttaaccagatataactgccgtttgcagttaacgcctgatattccaagctcaggctctcctccttagactggataaacgctcgatactgtttctgcacccgctcccggtcatggggatgaacccacttaatatccatttgagagcaattggccaggcgattcccgtcaagacccaggtcagaaaccatattgggggacgccaaaaggacgtccccttccaaatcccagacatataaatagtcactgcagattgatgctattgtattatataagaacgcttcctccggatctggattcacatcaaacaaagacatacgagcacctcccataccgcccttcctgaattataggagagcgttcttccaaaagtcaccccctcgaacccctccgggggaccaggcgggaaaatatagatccccgcagcagccgcagcgattccttccctgtcgtttgtatttttatggaaaaaagcggccacactggttatggaaccgcaactgttctaattgcatcttattatgctcaattcatattttttattataagcgatgttcaaaaataattcaagaaaatagtatctttcgtatcagggttatccgctgaatgagacgaagccttataaactcaggtttgattcccggtcaactataggtttattgaaaagtccggctgaaaaaaacgttcttctaacagaattaacgtagtaatccttcaggacaggcgataaaaactgaaaatggctctgcgctgtaaaaagcgagagccaaaactgtttgcttattgaagcagcctttatttaactgaaaatcattttttctttttttttataataccgtaatttcccctgctgccaggctcatagtccctgtatatctcatatttcttaccggatatttctgcctcatcatctcctgtaaatatgcaggaataaccattttcttcacagtacttagaaagtgcaggatagtttgcactatcttcatatggaaccaagaatactttctcaaacatcattctatggccgctttataccagcctctctcccacacacacgaaagtacatcccgtggactccccaatatttttttagttataacgtatcagatatcgctccaatatgatggttgtttttatgattattgctgattttattatctttcttgtggtcctcggacagacggagctgctgaggaatcggtgagcatcagagctgtaatattacgttcagcctcttccaaaacactccgctctctaaacaacatgaattatacgaaagtaccttagattttcttttcctgctacctaagaaaatactcttctcccctgatccccatactcttcctgtactcattcggcgtctgccccgtcttttccctaaataacttcgtaaaataagagaagttgttatatcccacttccatagaaaccgcatgaactggcatatcgctgtgctccagcaaagattttgccttatcgatccgtttatcaatcaaataggaattgatagaggtattcatctccctcttaaacagccgtgataagtaattcggatttaagtacacaacatctgcaagatcattgcgtgaaatcgcggtgcaataatgattatccaggtattccttcacccggcttataatggaatcagttttttccgtcatttccgtatattccatagacttttcaatcagataatccgcatactgtttcatatattctatagactggagcgccaggtctgacagagtctctgcttctttgctgtcaaacagcttatgcatctccacatgattttttctcagatactggtagaccaactgttctacatccatgcggaacatccggagtacaaagctgttgatctgcttttcagaggccagctgttctaaatagtccgtaatcatcccgctcagtatcttttgccccccgctgtggaagacagtttcccagatttccaaatccggcatgttatagccgatcttctctctggtcttgacactcttacaggttattaccttctcatctgattcgatcaggccggttaacagatttttaagttccatgagttgaccataaataccatcaattgtggttatctcactcacggctccgtaaagttccagatgttcctgcttttccagatactcgatcagccgccatgccgtattttggatgtctatcaaattaaagatatccggctccagttttaaacacagtccgaactgcccttcattttctgtaaagtcatagacactttcataataagtatccttatagaattcccgcagcatttttctgatccggttcctgtaaatacgcagatactcatctgtatcgcgccccagagagggcatgatccgaaaaagtatcaccgcaaaatgatgatcctgtgtaaaagaaagcttatcactgcaaatcctttcccagacgatttctttcctctcctcaaaaaaacctttcgttaagtcaagccagaagtgttcctcaattacatgggaatgagcggccagatattcactttgtttcctgtaagcgcctattttttcatattccagacatcgctttaccgaagatgcaattccctttgataaagaatgttcatcgactggtttcaaatagtattccaggctctttaactcaatcgccttctttgcatattcaaattcagcgtagcttgtcaaaaacatggcctccagccgtatattccgactgcggacccactccaaaagttccaggccgctttcccccggcatctctatatcggtaagcaggatatggatattctgttccaaaattatttcttttgcctgctttgcgctcgatgctgtgtaaatctcattgatgccgagactactccagtctatttttttacaaatcagctccagaacgtatgaatcgtcatctacaattagaatattcatttctctggttcctttccggcctcttgccccgctctttacatcttttcccatccccggccggcaagaccagccaaatccagatgattcacatgttttatagtttccaggatatccccggggatgttgtggcttccaacaaaggcggtacttaaagcaccagccagagccgcaatagtatccgtgtctccgcccatggaagcccccatacaaatagccttaaagacatcaccgcctgccattgcgaatgctccgaacacggctccgcagacatcagacgaggatagaccattgcccagaacctcatggagccagtccataagctggcattcatccatctccctgctttttgtaaccacctctttaattctggccgatgaagaaggcgagctgcggatttcttccacaaactcaagcagccgctctccgcctctcatagctgcatcgataatctcttcaaagctttctcccagaaaggcagcgcgcagtgcaaatccataagcccctgcagcttccatcgcctccgatgtattgtgagtgggcacaagacaccgccatatatgaaccgccagttgatcctcatcctgtcccggtgagaacaggaatacacagggcgtcctcataattcctccgcaggtggtcccttccctgccgctctcatagggtgagactccacctttgatgtctgtcagcgcttttgcagcactggggccaatgtactttttctccatggcattcgattcattaatccatcgaagaagtccctccacagtagcctccacagttacttctcccgcttttttatattcttccaaaaggatcaggttttcctcactgtcatccgttatgcttcctgtaggcagatccttatgtaatttggaataccttgtatcaataagactggttacccagcctccaaacttccttataatttccttcctggtcataaattctgtggccatccccatggcatccccagtcacaaatgcctccagaactgcagtcagccgatcttctattactttatctgtcatatcagaattctccttctgtttccataatcattcacgtatgccatacctttccgtctttcctgctcacaggaattgtcaactctacaaccgcacctccctgagggctgttataaaaccggactctgcatttttctccaaaatggtattgcagccgttttatactgtttgtgataccgattcctgttccattatcccgttgcagggattcccccttctgtagtctggacagaatttcttccgaaaatccatcacctgtatctgttataaaaatatggattacaggctccctgtcaccattttcctccataacggttatggaaatatccaccggccgttccagtgcaaccgtattctttaccgcgttctcaacaaaagtctgaataatcaaaggcggtatatagcaatctatcgtgcgtggatcctgttcaatataatagttaaatgtccggcgataacggatgctttgaatctttaagtaattcttgacataagacagctcatcccggattaattccttacgcatatcgctctttaacagataacggaaatattcggaagtcaaacgcaacatctgcctgcattcatcatacttttccagttccaccatgttgtaagccagatttaaacagtttaaataaaaatgagggcgaatctgaagcttcataaattcgattacttccttctgttgttccatctgtttttcataaagagatattttcagatttttaatctgttcagccagattacggaactgtaaatccgcctgctccaactccagtatcctggcgctgtcgagctcggggagttcctctcccccatacccggaaaggccttcacaaaatgtctgaatcggttttataatatggcgcactgtgtagtaaaaataaaagaacagaccaaacgccgttccaatcgtaatcgccgccagaatcagctgaagccagagaatattctgaaatatccttgagacaggaataaagtaacggattgcaaacggcagtttatcaaacgttctctgtatctcgatgtatttagaaaagaaaccggtcttctccaaatatggttctattttgcctggtatctccgtcaggctgtctccatttaaactggttaagatcaagctgtcttcctccgcgtcgcttaaactgctcattaaatctgacatctcctttgctgtaagccagtatccaaaccgtatattttggtatttcagggtcttaatcaaatatatctcgccatcctcttccgcaatagaccagccatccatttttgaatactcattaatccggccttctctgataagggtcacaatcgtatcctcaattccaaattctccggaagacgcttcacatgcaatataccgatttctgtccgggaaatacagaaaaaaatgaaattgtgcagcataatcaaaaaaataaatactgaatacattatttaactgctcctgtccctgcagctgttccagcgatttatcagcagcgttcagtgccattttcaatggagtgtagagtgtcccctcgccctgtgtataatcaattatcatcttcgcctggttcctggtaatggcggcgatctcccggtccacggaatccatattggccttaactgccatcatcgcatactgcttctgttcatatctcgtatagataattgcagcacagttaaggagaatgctgaataccagtccgacagtgagaataccaaggacagggctgatccgcctcatcagattcttttttctattcttttttttatcttcactcactggccatccccctcatattccattcccattaagcccgttaaggaacttgttgtctgctctcattatagcgaaaagttcccgcattcgtcaaacgacagaaaatcagccctctttccccgcagaaggctgatttcccatcccctttattcacctttaatggctttcgtatatgccttcgcctgagaggaaatagtctcatgaattttttcaattccggcctggtccatccgctcatttaaatcggtaatccctccatcggtatcgtccaccattccgttaatcagaggattcagatattgggagatcaactggttaaccgccgtaacctctgccttaacagaatcgtcatccgcaggaaagcccataatcgtattatccaccacatagggtctcatcgtatcgtaaacactggtgataaactcataatgttccggctttaagctcagttccggtacactgtaataaaagccggtgagccccattccttctttggtaaatgccgggtgttctgctgaattcagtgacttataattaccgttgtccgtcacctcatagtcttctcccaaaatcccgcagtccaaaagctgatacagctcctgattcgttcgaagttccagcataaactttaacgcttccaccggatgtggactggctttgggaagtccaaacgcggtatgcatcggatgcttcttcagaactctctgtcccatggcaccaaaattgaccatcttgatttcccagtcaggattggaggttagtgcaggggaatagattaagttaaatgcctcccccgtcgcataggatatggtactggcgtatttccccgataaaaactgtccggcggagtctacatttgcggaaatgatatcactgtcaatccagccgttctccacccattctcttgcagtttctaccccctttttaaaagaatctgttttagagtacacaaccactccctgatccccctttaaatcatacgccaggttgttcgacatcgcataccagccgtttaaaagctgaaacatttcatttactcttccgcctctgtccgaacatggtaccattgtgggctcatattccttaattcctgcaaagtaagcttccatggaggcgatatccgtgatttccggaagattatacttctttctcaaatcttccctgtaggtaaaaccgatctcgatcagatcatccgaggtagatggtatattgtagatctccccattaatctcacactttttccaatcttcctccgggattgaatcccaaagttcgggaacttctttctgaatcatttcttttaatggcagatacgctccatccagggcgttggtctggaattttgcccatgtcgctgtataaatcagatccacatcattacctgtggtcaggagcagattatatttcgaaccgtcgaaagccagaggaaccacttcaattgtaatattcagcttttcttttaaaacagcatttgcctgctctacaattttgtccatattcttaggcgttgccacacaggtagctatctttaaatggatcgtttctccttctgcttttccactttttttctttcctgtttcacctgctgctgtctgtgtagtctcctcccccaccaaagccttttttgctccgcatccggttagcagctgtatcgctgctgcagtacagaaaacaacagaaacaacctttttcataatctttttcatctacttgcctcctaagtaaaaatattattcttttacggcgcctactgtaagcccttctacaaaatatctctgtacaaaggggtatgccaacagaattggcgccgttgccaccaccgccatcgccatcttgatggactctcccggaaactgcatcccctgaactgccgcacctgaggtcgctgccatcctctgaactgacatcatattatgaaggtaatactgtattggaaaatctttcggccggtttaaaaacagcattggcagataccagccattccagtaattcaaagccaaaaacaggccaacagtggcaagtgcaggctttataagcggaagtaccaggcgggcaaaaacagtaaagtccgtagctccgtctatcctcatagattccattagagaatcaggaatagaggttgtaataaagcttctcatcagaatgattaaaaacggactggtaagtcctggaagtatcacagcaagaagattgtccttaagccccagaatggctgccaccataatataaaacggaacaagtccacccgaaaacaacgtcgtaaaataaaagaaaaacgaaaaataatttcggtacttaaacttcctgcagtttaaaacatatccggccagtgccgtaacaatcagccccgccccggtaccggcagcggtaataaaaagtgttacctcataagatcttatcacttctcctgcggatgcgaaaatataattatatgcatgggcagaccatttttccggaaagaaagtgtaaccattccgtagtattgtattattgtctgtaaaagatgcgattaatatcatcaccatcggcagaagacttgtcagaacgagcagcgatataaaacaataggatatcacatccagtttcgtcagttttttcttcattgacctgtctccctaaaataaggcataatccggatttgaccgtttcacgaaataattacacgacagcacgacaaacaatccgaaaaatgactgatataaacctgctgctgttccaagccctacatcaaaggaattctgcagcagacggaatacaaaagtgtcaaagatgtctgtctgttcatagagcaggccattcgtccccaccaactgatagaacaattcaaactgtcctcttaaaatatttcctatggccagcagaagcaacgtaataaaggtaggcgtcaactgaggcagggtaatatatcgtatctgctgatatgcggatgctccgtcaatctgcgccgcctcataataatccttactgattccacttaaggccgccagataaatgatcattccatagcctgtatttttccagagatagatgagaactatgatatatttccagattccaggcgtggtataggcattaaacccggccgcccccatctcttcccgaacaaaatgggtaacagcgccggaattgccgttcagcattgcgtaagcaaatacctgcacgatgacataagagatgacgtaaggaaacagaatcactgactgcgaaatttttttaaatttcttggaggacagacgatggatcagaaccgccactaacacctccagaatattccctgcagcgataaataccagattgtacagtaccgtgtttctagtcagataaccaaggcttccgttttggatcagaattttaaagtttgtaagaccgataaatggacttccaaacagaccaccccggaaattatactgtgtaaacgcataatagattcctgccatgggaccatagttgaaaatcagaaaaaataacactgcaggcatgatcataagaaacaatctccagttttttctgacttctgcagcaaaaccctgattcctttctccttcccgccgtttatgggaatttaccgtttttctcatattcatatcatccacctttttaagactctgtttcacggttttaacagcagttcttccatacacctcccctgggcctcttccatggaaaccccaagcatgtacgcaaatgtcggtgcttcgtcgataatccgctgtcgctccatcaccgcccccgcctttacatcgggtccgctcataaaaaagataggctgaggacctttgtgcggaagatggccatgggaggatactgaaaatttatagtcagaattatctggttttacaatcacctggccagataccgcatttccaaaggcggttccggtaccgccttccataatatactcaaaaccgccttccagatggtgttccgtcttagcctccgcctttgtaaagaccgcttccactccataaattggattcttaatcacatcagctaagacagcttccagcttttccctggcctgtcgatcctccggatctctcatatgaacctgtgtggaaagagaagccgagttacagaaagcttcccagccagttatcgtacccgactggtcgagacggatcaacccggcttctgcaagcagaacattgggctggaacatcctttttaccgccaggtgaccgtggtcactgacaacagcaatatttgtaaaatcatcaaggcctgcctccttcacctcatcgagtattcttcccagccaatcatcatgaaccatcagcgcttcctctatttcccggccataaactccatggacgtgtctcatatgatcgagatgagccacatgcatgaaaaggacatccggctgtcttgttctgataagatcacaggcgcatccgacaatcgcttcatcgacgaagaatctggccagtttcttatagacatgcatatgttttcttaaaactccgccatctgccagcacactctccgatgaagaacctataagaacctcttccagattaccggctccacgtttcggccatatctcaggcacattccagtcagaagccggatcgccgcccatacacggccaccccaggcatgctgtggtatatcccgcagcatgggcagcgtcgagaatcgtgggaaccgcaatctgatcccggtaccagtaccagtccatctctctgctgaatgggtccacaatctcattgtggcagatatgatggcgttccggatatgttcctgtaatcatggaaacatgcgaaggataggtaagcgccggataaattccacgcatccctccgcgcactctggccgagttctttaacagacggttaaaattcggcagttcctttatgcatggtatgtcctcgtcaaatagtgcatcgatcgacatgacaatcagcttatttcttttcaacggccattttccttctttctcattttatcacctgttgtttctcatacacttcttatcacttttgttctcttatatcctacctttatttttttcaaatttctataacaggagggaccataacctatcacaaatgtgaccttttgcattaactctaacaaaaaagatgacagccgtcatttttatttgacatttgtcatcttttccatatgatttagcacctaaaagaccacagcttcagatgttcaattcttacagttcctcccatagtcatgatcctgttccggcactgtccgctgtccgaataaagccggcatgtatggacattcctgtattcgtcagcaaatacttccaccgaactctggtccataaaaatatgaagatccagcctttccttatcctgcagataaagattactcctactcactccatgattccacttatctgaatgattccggtccacccggagttctccgttctttaaatctgctgtgatatctgtgtagaagtcctccgttccgcaaagcctgaggatacaacactccgcctggctttccttcaaattaatggaaagcttcatttcatagatccggacgtccggcaaaaaaaacggtgtttcttctgttatagattcttctgatacagaaatcatttccctccgtcttaaactctctaattcttttacaggaataaattgcagagaatgatcatcgagcagtctgacctctctgggaattccgaaaaaaccacaccactcctctttttccgaagggccgtgcccattccaccatggcatccagtcccatccacctgcccacccaaacatgattcttcgcccgtcttcatcttccagcgtctgaggcgcataatagtcaaacccccagtctacctcaccttctctggtacagcagaactttcctgtctgataatccagttgtcccgtcatatagaccgtcttccgttcccctgctcccactggtgaaaaagtcagaacatcggttccttcgatcgaatagaaatcaggacactcccacatttctccccattcccccctgctctcagccattacactcttgtattcccatttttttaagtctgctgatttgaaaagcagaagcttcgcatagccatctttttttgtaccacagatcatataaaaagaatcatcatggctccagacctttgggtcgcggaaatcgcattcatcgtaaccagccggcgcccgcagtacgggatttccctcatacttttcaaaggtgatcccatccgaactctcagccaggcactgtacctgcacaaaaccatgttctccactgctggttcctgtatataagagatacagctttccatcatattcgatggaagttccggaaaaacatcctccctgttcgtgagaatcgtagttctcgctcggtgccagggcaaccggaagataagtccagtctaccagattatcacttaccgcatggccccagtacatttctccccaggcaggcttaaatggattaaactgataaaacagatggtactgtccgtgaaaatagattaatccgttcggatcattaatccatccgctttcagccataaaatgaaattgctggcgcatcttaccctgtcctgcggtctctctcttttcctggatagcccgctccgctttttcaatatttttcttcaactgcaagctgctcatttctctcatttctccttacatcattcttcccttttcatcatgctttcaacatcttcccagtacgggatactgacagaagcaccgtttcgccctaccgccagtccagctgcggccgtagccgtctccagcgctgccttcacagtcatggatttactgatacacgccagataatagccaccaaacgtatctccggccgccgtagtatctacaacagatacctgatttgccggcaagtggaagaaatcactttctgactggtaatagaccccttcttccccgaccgtcatcacaagtatggctgctggatacttctgatgaagacgttccagaattatttgatagtcaccctcatcacattctgccagatacttcgcctctatctcatttacaaaaaaaatatctaccatttccagcggatatccctgcatgtcttccgtaaccggagacgcgttaaacaccacagtcatccccttttcgctggccttccggatagcataggaaacgagagaggtttcattctgaagcaggagataatctcctttcccaaacggttccaacgcgcggtccacatcttccctggtgatttccttattggcaccgccatagacaatgattgcattttctcctccggtcacctgtatgactgcgcttccactcacccctccggttctccggaccagttccaggtggacattttctttttccagcacggaaagcagttctccgccgtcactccccactgcgccggcatgaaaaacctcgccgccagcccttgctatggcgacggactgattcagccccttaccccctggataaacatgacactcctctgccgatattgtctcctgaccttttacaaaatgattaacctgatataccttgtcaatattcaatgagcctaaattaagaattttcatatatttctttatctcctgcgctttttatctccatggaacgacagtagaaacggcttccctctctgaccgccaaaccgatgcagcctgccagatatggtctgtcctgatccaaaacagtaagaaccgtgttctgaagcttcgcctgaatcctgtttccagtaacattgactgtaatccggtacgtctgtccgtgctcccattcgcagggaatctctcccagtacgatcattccctgtctggttttcttcatcacggcaaacgtacgatctgagcgaaaacctgcaaggtagcttctcacggcgccttccacccggaccgccacataatgctcatctccgattaccggttccagttccgccgtcacctcatagtccttccagccgtgatgtcctgtatagcattccgcataatcggagcaggagatcaatgccctgccctcttccagacagaactggcctttcagccgggtaaactggctgatttccttatggaccggagtccagtactcaacccgttcttttgagaaatcaatcgtatattccggagctcctgtaacataaaaatcatccaccataacagttaataccgaagcctctgattgttccggatttatggtaaaaacgaatccggcttcatcaagcagtactccctgcattgccggaattttaaagtccaattcctgccacattcccgcctttaattccatctcactacttgggtaaatctcctgcgtctccgcgtttctgacatacaaagccgcacggcacggcacaccgtatcccggaaggaatgcgcttccatgaatctcctgtcccggataaaccagcggtgaaaaagccggatcatatctgctgtcatgaaaatccgcaggtcttaagtaggtctttttaaaagcaaatattctgcctcctggctctgctggtcctgccgacagcttcaggctccttttccccgtatgggcggcttcgtcggtattgaccatgactgtttcctgaattttaccttctttctcctctccgtttcttagcaaaaaggcgtgtgtggaaccggaaaattcaaaatggcagctgtcaatccgtgtttctataatggtgccaaatggttccggcagttcttcccctgccagattccatgcctgctttatcatatagcaggccccataaggaatatcctgattgttcagagaacctataacactggagcaggcgacaaaatcattgataggctccctaagtgcctggctgataacggaaagacctcctcgtactcccataattactgcaacatttcccacattgcagtctgtatcccagccgcaccgattacagatatttaacgtttctgaaaaatcaccgtttccatacagcaacgccagaattataactgccgtattaggtataatgtgacagtttcctggatatttgccatatccatagtgttcctgaatatattccagacagctctccggagttcccggatgctccatataaaaacgcatcacctctttgactatcttataatatccgctttcctccggaagataagaaagccccttttcaataatcgaaatgatatttttttcctcaaatgctgcactgatacatgctgcgataaatattccgccatggatgccatcgcctccatgagtcactcccgccgcctctctcgccagctttgctgccagatcaggatttcccggtgcgacaagtccccaggaatcgataaatatctggcctccaatctgttcggcgacagctcgcccattctgccggatgcttccgcttcgcggagcgggaatgccgtcgtgcaggtttagataagccgtgtgctccgtcgagcatccatagcctccccaccagaaaaatccatgctcgaacggcacgtaattaagcagtgcctctgcgacatcctcagaacacagtttctcttttttccctgaatcttccagagcccttataaaaaacagaggcccgttactgtcatcatccgctgcaaaacgattgtattttacggcataccccgtcagcctgccgtaaacatctctgatcttcttgctggaccagccctccaccggagcccccagcctgattccaatgatcttggccagccaaccggcatatattttttctatgtattccttcctcatcctgctcaattttctcctccttatccctttacgcttccgctggtcataccttctataaacctcctgctgaacaacagatagactacaataatcggtgtaattgtaatcgcactggcagtgtagattctggccatattcgatgagtactctcccacaaactttacaaatcttgtcgccagcggtttcagtgcatccgtcgcaataaaggtattcgcccaaaggaattcattccagacatttacgaatataagtatggttatggtaaataacatcggctttgcaatcggaagtataatacggaaaaagaccgatgcatcactgcagccatccactctggcagcttcctccaattcccccggtatatctgcgagatacgttcttaaaagaagcatattaaacggaatctgcatggcaatatagatcaaaatcagacttatccggctgtttacaagtccaattttattaaacataaaatagtcgggtacgatgtagagaaaacccggaagggaaatagcaacaaaaaagtatcctgtcagaaaaccttttcccttaaatttcatcttgctgagcgcatatgcgcacatgctgatcaaaaacagtacgactgcaattaccaccgccgcaataaacaggctgtttaaaaacgcggttgtatatccgccgactttccaggtctcggcccaattggtaaatatccactttgccggcagtccaaatggtttttgtttgacatctccgtccgttcggaaggagttcagataaacctgcaggattggaatcgcctggatgatgacaagacagattaaaaagaaccatttaataaaagatgtgactttctttttcatgactcgtccagacctcccatctttgaagctttgctttgcagcagatagaacacaaaacagattgcgcactgaatcacgcagagtgcgcttgcataaccggctctgtatttggtaaacgcattcttatagatccaggttgccaggatttccgtactgttggccggacctccattagtcataacatacacgtaatcaaaggtcaggaaagaccacatcactgtcataattaagacgaatgcaatcgtccgtttaatagccggtaccgtaatataccatatttcctggaatacattgaccccatccacccttgctgactcgtaaagagaggggtccacctgctgcagtgccccaaggaacataatcataacgaacccccaccagtgccataaatcgacaaatgccacagaatagagcgctattttcggatttccaagccataatgtctctgccagcccagtgagtcctatctggccgaagaactggttgatcccgtaaaatggattatagtacgcagtaaacacttttccgattacggctgccgacaggacatacggtataaaataaacagtcctcaaagccatctgaaaccgcttaaccctgctcaccataactgccacagtaaaacccagtacaatgggaaccgtcaagaaaatcgcggtccatttaagattattgaccacggctgttataacaaccggatcctgtgtaaatatttccttaaaattatgaaaggcgacaaactttggatctccaagtccgttccagtcaaagaaagacatgaccagggtacttaacgcagggatcgttaccagacagagatgtaccataaacgctcccagaacaaacaggtatggtacaacgtttttcttctttcgtcttaccgctgctgtatctttttccatttcatttctcctttccgccacagaataacatggcagggaaacttccccgccatgttgtcccgcactgcgtcttatggcagctgtggtgccgaaccgtctgccactgcagcttttacaagttcttctaccctgtttaaataatcatccacgcccagctgtccaaggaaaagcgcgtctgtattttcattcatgtagttacgggctgtactggggaagaatgtccatgaacagtatccaacctttccggaatccattccatcaaacagggcctggtacatatcaagcatcttttcattcatgccgttaaagctttccggatcaatcgtcttaattgggaatggctggaaaccggcttccacgacacctctaatatgagtttccagattgcctgtatagatccagttaagtacctccgctgcaaaatcaggatccttgcaggacttattaactgcaaagcatcctcctgttgccagaggaagaattcttcctgatccgtcatgaatttccggcataacttctacatcccatttgcactcaggatacgtagtaatcagcgaattactggcccaggttccatctatcatcatggccgcctttccattggcaaataaggaaaccatatcgtcacctgtaagtgcctggctttttttatctccgatatagcccttctgccaccagtccaccatggtttcaatacctcctttgatctgtggatcagtccatgaacggctgccttccagcgcttccttcatggcgtccggtccggcgtaacaacttaagaatgttgaatacagccagtccacagccccctgataatcggaattgccaaaggaaaatggaatgatccctttcgcctgcgcatcatcacagagcatcagcagttcatcaagggtctccggtttctcccagccgtttgcctcaaatacatctgtgttataatagatcaccatcccttcaaatgaattgggaagtgagtaaagctttccgtcataatagctcgtaccatacgcccagtcgtagaacaaatctttccagttatattgatccgcataagctgataaatcaataatacgctctgcttttgcgtattcaaccgcatctgtcggcccatttaagtggaataagtcgggaccgctgccacctgccacctgtacctgcagactctgtgcatctgatgccacgtcaatcgtaatattatcgtttggaaaagctgctttaagctgtttatcaaagtaatccttccgaagttcatctgcttctgccgtgacagattccatggaaatcacaagagttcttcccccctctttggccgcattccccggctctgtggcctcctgtgtcccggaattctccgctgctcccgaagccgcatcatccacattttttcctccgcaggcggttaatccaaatgccataatcccggcaagccccaatgcagcaatccgtttcattttcctcatagtttcgttcctccttgattaacccttacagttttattctctctttttctcatcttcataacattctaaccaacaaacagatgcgcgcaaccaactgtattgtagctttatcataattcaacttcttctgtatgtcaaccgttttcatatattttctgtcaaccgttaccatgtttgtgaaaaccttctgaaaatccatacctttttttgtaaaaaaattcccatactttttttctcccatatgctataatgaattctaaagtaaataaaagggagattaagatggcaaaaattacaatcaacgatgttgccaagcatgccggagtttctattaccactgtctcaagagtcctgaacaatcgtggatatatcagtgacgcaaccagagagaaggtacagtccagcattaatgagcttggttttattcccaatgaactcgcccgttccttcttcacctgcagcagcaatttaatcggtcttatcatacctactactgcgaatcccttctttggtgaactcacattctatatagaaaaacaactatctaaggaaggatataagcttttcatctgcaacagcattaatgaaaatgagaatgagaaagagtatctccgaatgctccaagaaaatcgtgtggatgggattatcgtaggaagccacaatcttaatattgcagagtatgacaaactgccattaaaggcagtatccgtagagcgcgtgcttaatgactccatcccggtgatacaatgtgacaactaccagggcggccggattgccactcagactctgatccatgcaggctgccgcaaaatactgtgtctgtccggtgattttaaattgaatgcccctgccaacagccgttacaccgcacataaggactgtatggctgagcatggccttccatatcatattgagagcatccccttcaccgtgtccaatgaggaaaagattgcgcgtattacagaaattatggattcctgtactgatattgatggtgtttttgcaggtgatgacatactggcttcgattgtttacaactatgctgtacaacaccagataacagtcccagaacgattaaaaatcataggttttgacggcacggaagcgatccacaccatatttcctgccctcacgacgattcagcagccaattgaatttctggctgaaaaatccgtccgtctgctgctctctctgatcagagaagagcgtgtacctccggtaactaccctgcctgtagacctgtatcgcggtggtacggtttaatatggctgtactgctttagaaactcactaattggaaaagaggctgagacacctattatgtgttacagcctctctcctaacttagtttccagtcaccagccttactcaaaatccaaaaatgttgcttatcctgtttaaagttccggcgctataatatatttccccagcgatctcagttttggatctgccagtatcttccccagcttttccagaccgcacacttcataaaccatgctgctgacatcaatccggcccgaatcaatcagatccagcgcccgcttctgggtgtatggattaatataggatgcctttaaaaccagttctttctggaacacggtaaatggctttaccgcaacggtttcgtccggctttataagcccaaacatcatgacaaccgcctgtttcccggcaatctctatcgcctgctcaatggtggacggacgtcccacgcattcaatgaccgtctgaatccagttcattcctgcgtcttccagttcagccttcacgtcttctgtaagaggatcgatgcagtcatctgcccccatcctgcgtccgacccggcgcttttcttccaccggttccagaagcgccactctggctgcacccgccagtttggccagctgcaccataagaagaccgagattccgtgatttccagcctgagctgggattgggacagactgtattgttccatcaacgcacacaaggtattacataaatccgggttacagatgtcacaccgggagatattgaccgaaatgggcggtgacaggctttctccatctctgctcctccatttacataaatatcggcagctctgctcccatacataaacatcaagtttttggataaaaccattcttttcaaaaaggggaataaattcatccggagaaatcagcccccataccggatgctgccagagaaccagtgcctctatccctaccactgagccgtttgcatagttgatctgtggctggaaatacagaataaactgctgttccatcaaagcccgctccatatcttctgtcagcttctgttcttccaccagctttttccgcaggttatcgtcataccaggcaaccttgctcacataactctccttcactgtcagtaaggctaagagagcccggtcgcacatcaggctgacttcgatttccgggtcggttatttcataaatccccacgctggaggtcagctggtaaccaggaacgatactcttcagccaacgtgcatgacagtctctccattttggagaagaaaactcctccaatggcagcagggcacaaaaatgatctgcatgatatatccaaataccgcagtttccggccatatatggcgccttatttccctgccaaaactggcagcagccggtctcctgcctgtgctccgtacatgtcgttatacgccttaaaacggtcaatatcacagcgcggcatgacaaagcgcctttcctggctggcatccaggattacgcgcacatggcggtagaatgcctgtcggttatataatccggttaacggatcatactctgcggtatatacatctgtaatgtcggtgcgggcaattaaaatctgtgactgggagccgtccagatatgaaaatttccactgtttgcgtcctgctttggtctgcgataactctctggccggaaaagaacaggtgtaaaattcctttttctgaagttcccgaatcacatgggtacgggccatggtgcgtattccctcatcataatactcctctatgatcagtttttggaataccctgggcatttccgtatcgtaattactgccgtttctggccatataaacaggtatctggtattctcattttgtatcctgaatgtcatattttttcttcaaccatttctctggaaggattattgcagttattctattttaaaccggtaacggcaggaattggctttccatgcccatccccgccgtgtccccgcgttatttgtctatcttattcagttgttcataaagatattgcagcgcagcttctcttgattcgaaatgctgtgtttgtcctaatatataacctatggcatattcccattcttctatagagtattcttccggttttatttcatgaagtgcctttgaaataattcgtccgctcgccccgccatgcaggtcggagatataggataatttcgttaattcagttaaacgcttcaataatttttcagatatgatccgcatctccttatttggtgcagttccttttttgtagtaccacgagggcagaacatcattaccggctgccctcatggtgattgttacatttgtgctgtgttaaaactgtctatgctgttgtaccggttatttctgtattccatcccacacaccgttttcatcgacatagtagccatccggtgttgtggtgttccggtataattttcctctggaaccgtccggttcctcattgaaatagtagtattttccgttaatgatgttccagccaaagaacatggctccctgggtattatcgactgacgaatttaaatagaacgtattgccctgttcatccgtataccagcctgttaccaggtaaccttccgcgtcgaataagaaccagtcaaatacccgctgtccgttattcgcatatggattgtatgctggtacccaggttccggcataatcggttccgtccgggctgccaagtctccatctgccatcgccaaccgttttccagtttccttctaccacataatccggtactctgacattgtggagaattttggttgcgcctttgtaattatttggcaggcattccggataagtcgtggttgatgacgagctggaagatccaccgccggaagaaccgctgccggaagaaccgcttccgttataggtccaatgggcgtaaatcgtggtatctgcagtatatactgtgtcggtagttactgccgtgccgcctgtggctgccgtgaaccagccattaaagttcatgctgctgtgagttggggtaggcaggctggtgagcttgccgtctgcgcctgtaactgcgctggcagggcttacgctgccgccgtttgcgttaaaggtgattgtgtgggtgaggcttttgaccgtaaccggattctcatggtcgcccaatttatggtcatctgtaagtgtacttaaatcgaccacatcgccgcccatataataattacagccctcttccaacaaatcacccagggacatgtcatcacatctgattgccgcaccaacactgtctgattggccaaccttaaatacaccgccggtcagcttcaccgtgctgtcgctgcccgtaataataagtccggctttactgccgtaatactcgccgccggtaatcgtgacattgctgctgccgctaatggacataccgtgcagaccgccggaaaccctggcctttaagttcttcactgtactattctcgatctgaaatggcctcatccccgaactattaacggtaaactcgatattgctgccgtccagcgtgccgttatttactatgattactcctctattgaacgaaatagctccatctatggtcacggctgcatttccaatctccaggctgctgccgttaagattattgtcgacgctcagtacaccgccgccggcgctgtcctttaaggtcaggctggtgttatcagttaccgacactgccttattgctgtcggtgatggtcttaccgttaagatccagggtgattgtgccgcctgtgttgaaagtggcggtggaattgatatctttcaccagttgaatctcgccagtgccggtgccaatcgctgtgatggcggcagccagagatcccacttccgtccagtcgcggtcaccgctctttttatactgcgccacaggatcagtagcattaatagtccattcatctactccaaagtgcagtccagcagcagtaagggctgtttcataggcttcttccgttccttcaggaacagttacgttcccggctatggggacgccagcaaaacacctactatttaatgatgatggtggtgtgttactcttaaattcaatcgattttaatgagctgccggtaaatgcattcatgccaatggaatttacgctctccggtatctcaatgcttgttagcccggtctgtataaaagcacggtcgcctattgatgctacactgtttggtattgtaacattatctaactgttgacagccgctaaaagcttcatcgcctatcatcgttacactgtctggtatcgtaatactaactaactgcgtacatgcgataaaggctttacgataaattaaagttacacctgatgtcaaaacgatgtttttaaccgcatctccatcagtaaaagtaccaccataccacatgagggttccgtcgttggtggaaatggtcagtgtgcctgtgctcgtatcaaaaatccaacctgaacccgatagcatcgccgcagtagctgtgccataaaactttttataatatgcgccgtcctcagcaatctgaccctggcagatttcgcagccgtccacatgctcccacagcgcgtcgtctttttccagagcttcctgatattcctcgctgtccttgtctgcctccggatcagtgacaatcttttccaccgcaaggagcctgtccagtaggcggttgctttcctctttactggtacactcaggatactgtaattcttccggttctgtgaccggtggttttaattcgttggaattttcagcattgcagatgtcgcagacataaccacagggctcgcccggttctgccgccacatagccgcagtcttcgtcatgcttatgctgacaattcagtttctctttgatgcagcctgtttcctcgttgcatacatgggaacactccgtcggttcctttgcattggacggagatgcctcctccatgtcatcgccctccggataacattccgccttatgggcatggacacagtcttccactacatcataacagtcatcggtatgtacgtgggtacagggggttccttccgtccccgccacataaccacagtcagccgtatgttccgggtgatgttcacatagtccctcggaaacactcttcgcgccgtctgttgttgctgccataacgcccacagagggagtcatggtgaaaaccatcgccgcagataatgcaatcgttgcaattctggagctccatcgttttcttctttgcatactcattctcctttgcttttttatgattcttttatttggaggttccggaaagacacagcataaaatgtcatgacttccgaaacacagaaccatcctaccgtgaatcgtctctaacatccgttccaagacgtgctttctttaccagacctgtattccagtcattgtaactatcatggtggcttcgcggaatacgaatcaattccttttttttctgcatcctcatttctctttccttctcatgttttaactgctctcttattttaaaaatctcatcctttcgatggacgttcagcattttcttccgcttctgctgcaacatgtttccgtttcatatccgccttattctgatacatggcatcgtcggcccgtttaaatacattggaaaagaccagatccgttacactgttataaacagcgattccccttgcgatggataagtgcttatccttctggtcactccgattatattcctcaatcgcaaagtggaaattctccagcagatgctcataattcgcataatctgctccttccatgatgactacaaattcatctccgccaatccggtaaaccgggctgtgcgggaagcacttacaaatcagacggcacgcatccacaataaacatatccccaaaatcatgtccgtaattgtcgttgatacgcttcaaatcgttaatatccaataccacgaccgcaaattccggccgtccattccgcatctgttcctccagacgccgttccgcatcctggtaggccgtcttgttctttacgcccgtcagcgcatcccggtaggccaggctgtttatgtaattaatatacttttgcagatgatcgacggtctgctgaaagctgtctgacaacatacctacttcatcctttgtctgctgcgtcagggaaatgcttaagtcccctttggcaatctgtttcgccgcctcatttagttccttgagcggccgtaccatccgtctggtgatcagtactgtcacccatacggaaaccggggcaatcaccaggaacgctgccacaatctgtaacaaaagcagatttttgtttttgtcaatttccgaaagcggagccgtcacggccagccgcattccattacgaagcgtacgaaacgccatctgtcttttcacattctcattcgtataagaaaaaagactgctcccgctcgtaccgttttccagttccgctaccagcggaatcaggctctcatccacatttcccatggagattccaaacggatagaccttatggcacatgacggttcccttttcatccgttaaaaaggcgcttccactctcataaatccgcacacggtttatcatttcttcaataacactaaaatcaatatccatgcctacaacgcccacggtttcgttattcttatagattggaattacataggaaatcatctggatatcaatgttttcatttgtataagggctcatccagatcgctctgccatttcttacaggaatatagtaccagcccacgtgttcggtatcagtagggttgtatctggaaaagtcggtgggaacctgcttctgaaaggttccatttaaattggttttactccagaatacgcctgaagtcggcggagtaaaatcaggattataacggacgtatactgccaccgctccttctgtgttgtttgccgcattgacagcgactgcctctatttgctccgtaaatgcctttcgtgtgtcgtcactttttaaaagttctacactctctaaattttcatctgtatagacggcaagggttttgactgactgctcaatccgggagagcatggcgtccacttcgcaagccagttcactgcaccggtagttcatcatttgggcagaatcctcatctaccacccgttttgcgctgatgatgccggctccgccaatcacggcagaacagacaaagacacagcttaaaactaatgtgataaattttgtctgtattgatttcataacttattcctcctgggtctggaatgagatgaaatgacattgttctttatgcgtaacttgcgttcccatgttttagaatccctttcgattcttttctgaatatcagtgataacaaatggccggacaagacagcctataatctccttgttttttttcttggcaagccctgtattatcatcggtaacaagataaatcatggtttccgggcgaaagtgatggattccctcggccacctgaattccgttgaaacggcgggtataatattcggcgaagaccaaatccaccgggttttcaaagctgtactgcacagccaggcttggagaggtaaagtctgtaatttctgcattaggaaacgccgcacgcagacattttaccagttcttccagccgatcaggttcgttatctaccactattattttcatccctgtttctccttatttttgatacctgtaacatctatccgcctgtttttattatgatatatttctttatagcataataaacacccacaaaacacgttttgttgcgaatagtgctgccggcgttgtaattagacaggtgaaaaagcgcatatgccgtcgaagtaagttgacaacttccgctgccaactagtaaaataaatacgaacaaaaaaagaaggtactgatgaagatgaagattaaaatcgccgtatgtgaagactgccaaaaagatgctgatttattatgcgaacagctttcccgttactgtcaggaaagtggtctgccgacttatgatgtagatatctatccgaatggatttacattttctaaaaattgcttaccgggaagctatgatttgatttttatggatatctatctggaacaggatgatggaatgcggctggcacagaacttccgcaaggctgacaaggaatgccctattgtttttttcacccgcagtacagaccacgccgtagaagcctttaaggtgaacgccgcccattatctgacaaagcctttagcctatgaaaatcttgcagaggcgcttgaccgttgcctgcgccttcatgaaagacagtccaaatttattctgctgcctacggaaaaagcggtgcagaagatacgcgttgccgaaatcgtatacattgaggtctttaacaacatcagtgtggtacatcttaagagggaaacggtatcctccagaatttcgctgaagaatctgcttatggaactcactaaaactgaggctgacgccgaattcctgcgctgtcatcgaagctatatggtgaacatgaactggatcagggcactcaagagcgatttttttctgatggatacgggaatacctgttcccatttccaagtacatgaaaaaacaggtcatttgcgcctatgaagaatttgcgttaaaacagatacgggatacacaaacgataccggctacgccgaaggaggtgcgatgagtatgcggagaatcctttccgtaacattagttttggggcttctgctctgtggaacacccgcttttgccgccgttaaaggcagcggggaggcatttccatcacagcagaacgctccttttttcctctccgggataaatttatcgggtaaagacagcatattggaagcggcttccggtgatacactgccgggaactgccacggattccaatgcaacatccgaaacggctaaacctgcaaccccttcggatgcagacgacaattttgattcgaatcatcaaactctcccacctgaaatcgccacggattctaattcgacagcgccgcttacaccggagatgcaaaccgtttacaccgctgatgaactgagggacctgctggaaaattatgatggaacaggcgggacgatttcctttggcgcaacgattacactggaacacagcatttacttctatggggaatcagtctgtataaacacgggcactttcggtctgatttacgacggcggttgcattgaaacattaggaaatgacacattaacgcttgaactgacaggcgagggcattgatatgccagtactggaaattaaaagaaccgtgttgtatcccgaatggtatcacatcatcgactggaattgcgcgctgagtggtatggaggtgaccgctgtcgggcgggagggcaatggggggacggctgtcagggtcacggccgactacgaaaggcgcacccccaccaccgagtatcaaaccagaggacgcatccgctcctatggggacggcgcggtggggctggaattatgctcctccgcccagacataccttctggacatcgaggcggagggcaggaacgcctgcgccgtggccgctgtgaatggcgcggatttgttcgcctgcaagctgtccgcacagggtgagggcgctgtagtcgccacggggaatggggttattttagacagctgtattctgtcgggtgagtctgatggtgtcacagtgattcagagtaccatcgaaagccggacaggattggaaccacagcttatgcagtacactgattctgactcgatcgtttacgatgcaatggttcacgacgaacagcagtatcttctgagcaacgggaaatatatcgatttatatttacaatatgacgaaaatctgctggagcatctggataccagcgttcttggagccgtggatatcccggtatctctgcatccgtgtttccagggcttcggtttagagggcgaaaaggaacttacattccgaatatggattcgcgacccggctaaacccgtcatcacagaatattggcaggaggacagtataatcacctttttctcatggtacaacgatggtttagagccgggtacaagactttggtcttccaaggacggcggcagtacgtgggtggacatcagtgattcggatggcgttaccctatgtgtaaactctaatgatacatcattatttatattggatacctccggccttgaccaaaccatttttctcgcactcaaaaatgcagctggctggtcgaatgttgttaccctttcaccgggaaaagacggtaaaatacccgtcggagcgggcggcgaccgggatggcggcgaccgggaggaactgccgggcggcgatggcgggaatcacgacaacgggaatacggacgatgactcggccatcggcgacgacagcggttcttccggcagcactcctccatctgaggctggacagggcgggcagccggacaacagcagtggagaacatgacgatagagatgggaacaacgacacaactacagacaccggcgccaattccgctgtcaatgagagccaacagacagatcatcaacaggagcagccaaacaatcatggtgaaagcagcgtctctccgtccacttttcctgtgtcctcagaaaagtggacgatagatttttcacccatccgtttatcgcagcaagatcatgcacaacccgatagtcagaatacccaaactttttcagatatacctgtcgtgcagatgcctgcccacgatgaaacagaggctgttttaaattccctggaaacgcctgccgaattgaattcctttgatgctgttcccaatctggaagcgcaagagcgggaaagcggttttaccacgccggacaagtccgcttcttcccgtcaagcggataccgtcctctctgtccttgtcctctgtggagcaggcggaataacggcctttgtcaccttccgaaaaaaacgaggtgaacgatgatgcgaggggaaaaagtgatgcaaagaagcaaccactttcgattcgcttttatcctgcttctattagtgatttccggtattacctcatcaatctgtcttttgctgtatcaatatgacaacaaatacactgcacctggaccggcttcggcatatggcagcatggaagtggaagcagagactcttaatggacagggagtcatatggctggtggatggctgggaattttatggaggcctcctgcttacgcctgctgattttcgttccaatatgcctgctcctgaccgttatctattcgccgggcagcagggcggctttgaaagcgtaaccggaaaccctcatggcagtgcaagttaccgcttaaccataaagctgccaaagcagacgcagacctattccctttacctgcctgaactgcgttcctcatgccggctgtatgtaaatggggtggaacgtctggctctgggtgaaatctctcccgaacattacaaagctgaaactgcggaaaaaatcgttccttttgaagcggcaggtgaggtggaactgctccttgcagtttccgatttttccggtgcctatggcgggcttacctatcctcccgcactgggaacacctgattccattcatgatatgactacagtgaggcttaacctgcgcacagcgttgcttaccatgacggctctgtttggtgtaatttctctgcttataggaattgcaaaccctcaaaattccctgacaggcctatatgccctgtattgtctcacgtttttgggattcacctgctatcccgtggccaagactctgttcccagcctttggcgggttatattttgtggagaatttgtccttctgcgccatgattcttatgatatttattttgcaaagaagactctttacgcttgaaacacctgtgaatacgtttggcattgcattcggagggctggtctgtgtggtctgtattttttatcatttatttttaccacaggccagcctcaccatgcttctctcatattccaggctgatttcgctgtacaaatctataagcgccgccttgctgacaggaagcacgatctggatgcttctgcggcggtcagatgaaaccgctcaccatgcaaaatttcttttgtgcggtattgtaatttttgactgcacactgataatggatcggtttctgcccctgtacgagccgatttattcagggtggtttctggaaatttccagcctgtgcatggtgctgctgattggtgcgatcctcctgcaggaaatctacatccgcacggctgcaagtctgcgcctggaggaaacaatacggctgacagggcaaaatctcgccatgcagaaggaacagcaccaaaccatgatagaagcaattgcaggtgagcgtacctttcgccatgatctgcggcagcatatctccgtcctgcatgaatttgccgaaagggacgatatggattctctaaagcagtattttgaccagttagaaggcaggcttcctgcaaactatgcaggagttttctgtgaaaatgcggcagtcgatgcaatcctgcgccattataagacgaatgcggaatctgccggaatagaattcagcgcagcggttcaagtggctgaggggatgccgataagtgatgtggatttgtgtgtcatcttcggaaattgtctggaaaacgcattggaagcctgcaaacggcaaacggatcataaaaaatatgtgatggtgagcgccggaacatcggtgggagtgttcgcaattacggttgaaaacagttttaatggttccctgcggcgaagcggggctggatttttttcaagcaagcaatcgcgcattgggataggcacagcctctgtacaggctattgcgaaaaagtataacggcaaggccacatttaagtctgatgataataagtttcaagccctgattgttttgcatttgtaattaaaacattcctgatatagtcgttataacggtatcgcttcactctatcaaggccgtaaacctgggcgattgcagaggtctttcaggtacatataaaccgtcctggcacggtgcggcagttcctcggcatagattgcagaaaaatattccataggctcacctctctaatctgtccgaagcggcggtctgtgggggtgtgtcaaataaactgtgtatcacttgcagattattcgacacaccccccttttgaataggtatcatcattattgacaatactgcacgtagatggaataaattggtaaataaattttgtgaggtaaagggatatgacatcaggatttaattatcaggaggaactttctaagtgcagtaccatggaggatatcactggtccaaatggacttgtccaacgaatggtaaaagatgcgattgagcagatccttcaaaatgaaatcgcagattatatcacagatgaaaaaagtaagggaaataccccgaaacggaatggagcatcacccaaaaaagtaaagacttcttacggcagcattaacattgatgttccaagagtccgggaaggagaattcgaaccggaagtcattaaaaagagggctgtctcgaggaagggttggaagcacaaatcatttcgatgtatgcgaaagggatgacggtgcgtgatattgtttctcatgtccagacgctttatggaatcgaattgtctccggcttccgtttctaatataactgataaaatcatggaagaagcaagggagtggtacagccggaccctggatggtttttatccggtcgtattcctggatgctgttcactataaaagtccgtgaagaagggcggatcgtcacaaaggcagcctatgtcgcactgggaatcaatgcggaaggccgaaaagacatactggggatctggattggtgaaaatgaaggcgccaagttttggttgaaggtatgtaatgaactgaagaattgtggagtaaaagatatcctgattgcctgtatcgatggcctgcagggatttccggatgcgagcaaaaccatatttcccgaaacaatgattcagctgtgtattatccatcaaatacggaacaccatgaaatatatagcctataaggattccaaggcttttatgaaggatctgaagcgggtatacggagccgagagcgaggagatcgcatttatgaatctggaggcgatgaaggacagctggaagtagtatagtgcggtcattgagaactggcagatgaaaggatccgattttcagaagaatctatcataccagttaatgcggaagtaatcgttagcggaagatagtctgtagaagagaatggctttctccagaaattcgcttcgacttttgcagttatctttttccttccattcatctaatgctgcaagcgtactcggatatagccagaccggaatccgttctttgatttcgccttccatgttcacctctcctcaaaagaatactacttgtggcagtagtcggatgtttcttgtaatcgttgtagtcatatagatcccctgattctagtatttcccttatgatttcggatattaccattttctgtttgcccgatgctgggagatatccttttgtactttttactagctctgcaccgtctcgcgcagcaatgtaataaatcaaattttctaagcgtcttttctgacgtctataataatgacaattaagaataagttttggcatctccaacttccattaaataaattaactgcctgttctaattcagaaaacaggcagttaatatttataatttattctttaataaactttgcaatttcaccatttatacgatttctcgtcataattaaataagcatctgatttgggataattcgtaaaagtcaacggttccgcaagaaactcctccaaaatcccaagaacatattctttactggtcaatgcttccagaagctggcatgcccgcagatcattcaacgcttcatttaataccatacctcttattgattcttctggataaccatcttcgcctggatatacaagaaacgaatcgccagcagggaaaccataatcagcatcagtaacctcatatggattaatgtggcgagtagaccactgactattataaaaattatatccccagtgaagaattcctataatatcatatttgtatatctgaaggccgtaaattctgtttctggctgaaggcattgccataaaacggttactgacgtctaaatactgcatcgtacaataatacacccacatattatccacgccatgttctaaaaactctgcaatctcattatttccaggcaccggtttgtcaacaagtccctgacggtagaattcaaaatcagacaaggcatcaaatgtatgaaagccttttaacagtgaatcaacagaatctctggcagctttatagctagtgacatcgtttgctcctggctcatctgataaatgaaaatatgttttttcggaaattccccattcctcaagatggctacggagctgtggtagataaatgttcagaaattctgtatactctccgacagccggagtatgccagccaaatatctgtctctgctccccattaacttctgcaataatttttggagcatacctggctccccattgtgaaaaaagatgagacatctcaaagtactctatcccatgttgaatacatagatcaatccaacgcttcattttactaaagtcgaattcatacgtatttccatttttctttacacctaccagttgtacagttgtccgttctccaccaagagctatatccaatggcggggtaaacatcggggttaacatcatattaccgcctcgttttacatacagctcaaaaaaatggtccaggatacgccagtgttcttccgaaaacggttcaaccttataatagtctgcgagacaatccgcatgcatccattctgtatgcataattttctgttttggaagtacagcatcataaattattatctctgttttcacagttcctatcacttcattttctttggtaacccttaacttgattgggtaattacccgctttcatatctaccgttgcctcaacatcaatccaaaggcttctccactgattgggcgaaatcgaaacaatcccttgatccagttcccgtaaaagatccggatacattccggcttctgtgcgaagataattatcatcaacttggtcattacaggcacggccgactggaacattctccacacttctaatacgaatagaatctgcaattggcgaaatacactctactctgacaatctcctttaaaaatccgcttccgcggaatgccatctgaaaagatactgtttctccctttaaagtggttattttctgacattctgggctgtatctgggttcctcatcaggaaataccttttgtaaacaactgactaatttaaactgatgcatagaatttatatcactcataacagttcctctctcagattgaaatacctgcgacagaacaataatgcaatgccgcaggtaaaatacatgtttaaaaatcaggacattgcccacatctcggccattggaatctgacgattttccactctcgatttttcagcggccagactcattaaatggctttccacggaacgggctgctgaagttcttccctccgaatcatgctctgccacttgctttacaaatcccatagtcagaagaacatccgcaccttcatggcccgtcatcaagccaaaatcactcacaggtattatctccacttctcctgtcaggaaattttcaactacaatttcgttatgtctggcattttctccaaactttttcatttctgcccgtaaatacccctttgttcccatcacttctataaaacgggtacagtcaggtgtaaacgcacacatggtaagtgtcgccgtcgcaccgccttcgaattcaagagccgtaacctgatgatcaaccacattattgtcacaatgatacacacatcggccatacggaccatcttccaaagcctttctcctggctttcaaagacatatcttcactgatcacagatacaggccaatgcgtattttctccaagataaaacctttcagcattaaacggacacgtgcctttcacaggacatgcatctgtacagcgctctgtagctcctgccggtgcattttccggcttaaagtactctaagcttccaaaagaactcactttcgtacatgatcgattcatgagccacaaaataatgtccatatcgtgacagcatttctgtaaaatcataggactggtttcatttgaatttctccagttcccccggacaaagctatgcgcctgatgccaaaaggctacattttcagcatgcttaatattaataatctcaccgagtttaccacaatctatcacttccttgatagcagagaaaaactctgaataccgcaatacatgacatatactgaaaatacgattatatttttctgcgtattttcccatagcaatacactcaccggcaaccggagacatcggtttttccagaagaacatgataccctttttccaacgccattaaggttggttccgtatgcatacgatcctgtgtgcaaataaaagcagcgtcagcaagtttaggctgatccaaaattttttcccagctttcaaaacacaattcgttcggtattttatgagcctgggcaaacctgttccgccttgcctcatctggttctgccaccgcaataaactttaaatctgatggatgttccaatgcacattcaccgtaaacttcgtagcctcgttgacccgcgccaattaaaattgcatttaccatttctgcacctcacttattagattatttatagatatataaaaaagttactctttttatttgtaaccaccaccacggatagaatctattaatactgctaatacaagaacgataccgcgaacaagcatttgatagtatgattgtacgctcaataatgtcagaccgttattaattatcgttaacaaaacaaggcctaagaacgttccagaaagttttccttttccacctgccagagacaatccgcccagcagaactgctgtcgtaatctccatctcagctccaacaccatttgcagggattgaggctcctacctgacatgctgttaaaacaccagcaaccgctgcacaggtactactgaccattaaaccaccaattcgcacacgtctaatatttattccagctaagtagcttgcatttgcattggctccaactgcatatacgcttcgtccaaaagaggtatattttacaaccagagcaagaataatatatacaatgatcaatatccagaaggaagtaggaattccaagaagatatcctcgtcccagatagttcataactggttggtcaatcgatagaatcttacttgatgtcaaaatatagcacagggctctgaaaatcatctgggtaccaagcgttgtgataataggatttattttaaacacagtaaccatcaaaccattgaaagcaccacatgccattcctactaaaacggctgctggaagacatatccatacaggaactccggatattagcattatagtggacacaacgcttgccagtgtagctactgcatattgcgacagatcaaaagctcccataaccatactgatcgtaaggccagcggccattacccctgtaacagatccggccagtcccatattcaatacgtttttaaatgagaaaaaatatggtgacttaaaagccagaatgatgccgacaattacaattgcaacagtaaggctgaaattcatatccatcatatacggttttatcttctgcataacagcagactgcttattttttgcttccattttatcctccctataaaccaatggccttcgccataatcgcatcttgagtaaattcttccttctccataattccgccaacttttccatcgcagacaataaccatacgatcagacatacccatcacttccggcaaatccgacgatatcataatgataccaattccctgttgacacagttcattcatgagacgatatatctctgactttgatccgacatcaataccacgcgtcggctcgtttaagattaataatttgggttctatggaaagccattttgcaagcacgactttttgctggtttcctccagacagagagttgataatagtatctgcagaaggagtcttaatggcaagtctgtctatccagccatctaccagttgcatttctacttttttattgagtatgtgactcctttttaatttttccagaacagagatcgtcatatttcgcgatacagaatgtatcagcataaggccatccatttttctgtctgcaggaatatatgcgattccttctttcttggccaggaatggcgaggtcggcgctatatccttcccatccaaacacattttacctgattttcttggatctgctccgaaaattgcacgtgctatatccgtacgaccgcagcccatcagtccaaataatcccagaatttccccctcttttacttcaaatgaaatattgtgcagacgttctgtctctaacccctctacagaaaaacaaatcttactgccaggtttgcatttttgtggatataaatccttaatctcacgtcctaccattaaggaaataatttgttgggaatctacctcagtagtgggcatcgttgcaattccctttccatcacgcatgaccatcacccgatctgacatctgaaaaatttcttccattctgtgggatatatataatattccaataccacgagatgtcagatttctgatcagccgaaacataatctctatttcctgattatttaaagctgccgtcggttcatccattaccaatatcttaatttctttcgaaagagctttcgctatttccactaattgcttctgggcgatagataattgctccaacggtgtaaagggatcaacctttaaacccacttcgtctagtaaggactgggcatccttacgaagtttatcataatccagtattttcaatgcgcccttgcggggcaaattaccaagaaaaatattttctgccactgttatttgatccacattgttcaattcctgataaatgacgctgatcccattcttaatagcagtaatcggggtcacgtgttcttgtttcaccccgtttaaatatacttcacccaaatcctgcgtataagctcctgacaatatcttaattaacgtagattttcctgctccattttctccgacaagggctaatatttcgccttcttttaattcaaggctgacatcgtcgagtgctttaacaccgggaaattccttagttatgttcttcatttccaacagcatagtatcccccatttcgttcacgttcgtattcaatgcttttctgataggaaaggaaggagaaacattactatgttcctaccttccttttaccgattcacaaaagtttagttactattttcagccagattacctctgtcaatcataaacggtgttggtccctgagaacgtggcacatctgtctttccctcgattaagtcaatcgctgccggaattgcgaaatcaccatactgtagctgttggaaagatacagaacctatatagcagttatcatccttttttaataaatccagtgcactgtcctctccgccatacgaataagagatacaattatctactctgtttgatgcttctactgccgatacaacaccgatcgcgcagggatcgttgttcgttccgaatataatttttgtggcatctggatgggaagtcaggaaatcacgggtaatctgatttgtcttctgggtctgagcttcattatcaaaccagaaaacctgatcctcttctacagggattccattttcctgtaaaccgtccagacagccctgcatgcggtcctttacctgaggaccaccactctggaaatactccagtaccagataatcgatgcttccatcccagttctcttttacataatccgccagatattttcctgcaataacaccagcctgatattgatccgttccgatcaggtaagagtattcttcatcaaacggagaatcgcaaacaaccagagggattccagcacccttacacttttctactgcaatcggaccaacctctcccatccaactggcgtcaataatcgcatctacattctgtagtataaatgcatcataattcggtgccagtttctgtggatctgcattacagtcggcatatacaagttctacatttcctgccttttcggctgctgcccgaaagctggataagtatctctggcttgattcgaaattttccgcatagctattgataccaatcttataaaccctactctgctctccttctgcttcgcctgtttcttccgtatcaccggttatttcagtcgtttcggttgctcctgccttttcagtagtcgccttaggctgcgtatcagcaggagctgtctgctgactgcacccaatcagctgtacgcataccaaagctgtgcaaattacagtagttaaaactttttccatagtgtgcctccgtcttttttaatattttcgtaactaaatcaccaattattttgtgcatttagtataagtttgtaactacattatagcgtaacacattatttatgtctttgacattttgcattgtgaatttgtacttttgtctattttattgtttgagcctttaatttgatagaactggcatattcgcttggaggcatccccactaccgttttgaattttctcgagaaataatggacagaagaatatcccagcatctcacttatcatcgttatgttatagtcctgattacgcagcagctcttttgctttttcaattttcatttctgaaaactttgccataatccccagcccagtttctctcttgaaaatatattctatgtaggatttgctaaaagagaacttggaacacaaatcatcgatattcaagttctcgcaaatatactcctccagatacttcatgatcgttctcgtaatatcctcatacatagtatttacgttaattgttgtaattctatctttactttcactggcaactaccttaaatttctgccgacgaatcaattcaatcaagaatatctccagcaaatttttcacatattgctggcctccaaatacgcctggatctttcttaggttttagataaattacgtttctttcttgttcgatctcaaatacattattggattcatttacaattttggccaacatcttctgttcccgctcgttaagtgtaagtatttttccaacaaactcttccataattgcacttacacaggtaaaagaaataacaataatattaggagatacttttttatttgctgataccgtgtgaaattcaccaggcttatggaaagcaatcatgcccttctttaaattgaatttattgccgtctgcactgataatcacttcaccatagtcacagtatacaagttcccaaaaatcatgttgctcccctggaaaatcaaaatttttatcatattccatgtaaaatagtgttgctatctttttgacttccaattctttttgtaatgatattaatttgtacttcataagcctgccccttttcctattttgttataacagaaaaccgacagagtatctccgtcggttttctgcttttttatcgtctatatataattaactgcattctatactcccccataattaatgagtataatcaagaatagtgatattttcgccaactgcctccgagacaatatcatgcatccttttcgcaaatggacacggataccctatcggtgttccctttttaatgcaggaagcaaaaacaattgtatcagcacctctttttacaagttccttcgcccttaatacagtcttttttcccggacagccgccgcaatttatgaaaccaacaatttcaatatcctcttcaatcccctcgaatgcccctcttttttcctgaatcatcttgaaatccgtagttcccgggcaaaaatcttccgtctgcatacatctaataattcctactctcatatttaatcctcccatcattatattacatattgtcctctctaatattagttacacctttgctcagcataatatgcataattaccttatccgtctgaagcatacctggatttccaactctggcaatatttttaatacatgcctctggagtctccgcacaaattccatccgttatacgtagccccactccattaatcgccagcaatgcactcataaaagcggcccctgaagcagtagacaattttaacgcgcaaccgacctttccaccatcgcaaatcatcccagtaatatttccagtcatattgcggatgacatagccgatctgttcatcatcccctcccaacagccatgtaatcgccgctgatgcggcggttgcagaagccactgcgcaagtacagacagcagacaatttaccaatataaccgtttatatactcatttaacagatgtgcgaaagcaataacctgcaacatcttctttctatcagcatttactgcttctgccacctgtgcaactggtaagataactgcaattcctttgctcccacttcctgcactgctcatcgccgcataaggacagccatccagtctagcttccgtagccgccgcaacctgtatcatgattttttccaatatactatctccaataaaagaacctcccgagtttaaatgcagcactcctgctattccaattccggcctcatactcgattccaaaattagccagttgctgattcatctttataccttctgcaagaaaactaagctcatattcataatttccagtcccatttcctgtttaccgataagggctcccaacgcagctgcatacttcaatccaacgttattaaaaccggcaataccaaccgacataccgtttttataaatatttgaacttacttctaatcgaattttttctatggttcctcctaccgcccttgccgaatccgctgctgctattgcaacacaggctggttctgtgcatccaactgccggcattacactcttatgcagcaattccagcatttcacatttattcatacttttcttcctatatacaatttagaaattatagtcatacacatgtaatagtttgacatatgtcggactttgtagtatagtataagcaactaatatctaactgtcaatctaaataataaaagtttgacatcaggaggctttttgtctatgtatactggaacaaatcccgctgcactacggtcccgtgatgagattgtacaggctttccttactcttttagaaaatacttccttagaaaatatggccgtcaaacagttaatggaagccacagacttatcgagacagactttttatcaaatatttaattccaaagaggaaattctggagtactattttgatactatttttagtcactttatcatagatttcaaaaaacatacaattcataacttatgcgatgcagcgaaaattttctttgctttttttgaaaaatacaaacctactcttaaacttattatacaaaatggtaagagttgtgttatacagcgtaaatgcagggaatatctaagaaatgaagaatttattcaataccatctgcaaggaatcaggtcagatcaggaccaggactacagcactacgttcgtaatcagcggcattgttgccatgcttgagcagtggatccgcgaagattttactacagctcccagcgccaatgacttagctctgcttgtatgccgaataacaggtatgccaacagcgacacaataataataaaaagtaatattttctgcccagggaaacttaaataatagtataatctactccctgggcatatttttaaatttcgttttgatacttcatgacttctaccgttctgatatcaccatttgttttttacatccatcaaacattttcccctaagattttcaaaatagtttcatctacatcattctgagctgtatatagaatcatcaatatagacaactctacagtcaacttaaataataaccttgaaattctgctctaagaggtatcaaccactcctgcaagtgctgaattaattgccagagggaggtacgtcatatgatcctgagttgataaataaccgttgtaaaaagtaactgctttttcaatatactcacttcgattcttacagttatcttttgatagttgcaggtctaactctcaattgtacttggatataatcatataggaatcctttttttgtttccattgtacggacgcgcatttcacgcctcttcataatttcgttatatggtttctcatatctctcctgcagcaactcagcaaccctctgaaagtaaatcatcaaaaatttgttcccaatattccatatcctctacctccttcgaccatcaatattatcgaagaatcctggtaaaatccatatacattacaattaaaaaccaatatcctcattgaatttatcattttcattttggttgtatccaaattataatttttgtattcccttcatgattcttattccatcttcaactcctttccgataaagaaactcctgatcttccccacatctgtcaataaagtcatccaaacaggcatcgactacagccagctgctcaccagttaaaaattttagctgctcctccataccgcgggcatgatttgctcgctcctccgttacttcatcatacggtcttttgtatttttcacgcagcagtgtatttacgctctcggtcagcagttcaccgaatatttcttcaaatgatatcatagcatgatcctccttccattttacattaccgaaggaggctgacaaagtctatacgaataaccactgaaaaaactggacattattaagcaaaccacccgacaggacaccttgaaagagttgtgtttcagggcaaactgtgaatagtgaaccacctggcaggtgacaatcttgtcgtttaggtgcacctttgcttttaagaaaaacgtccgcattgcgggcgtttatgactgggaggaggccgttccggccatctccctttaacctgcacacaaatcgaacggcagatttctcctgtaagcatacaatttagtgtcagtcggtgctcttttatctcatttatcacaacttgcccaaatcggcccaatgagccccattactcctgccatccggtaacatcttcgccctctgtcttataaaggcacacagcgccaaaggattcgtcacacggctaaaggatcgtgtcgtctatcaccataccattttaagaatactgcaaaaaagtgcaattgctcaagcaatttaaactgcttaaaccaactgcactttgtcgtgtcatccgatacaaggcatcaacctttcaatataaagcaaaaactgtgtatttcccgtctatcctattccttcaatgtctgttcatcatggcctctgaatggctgaatcttctgttcctgcttcagttctctgcatcgttccagaatcattgtccagcttttctcttcaagatcttcaggccggttcatttccagtacctgatcgaattttacctccgtataccttattgcgtttatcgctgcatcctgcaaagtctcatcaatctcagaggtctgagacgggatatctttctcttccgaaaaagcatggtcatgatccatcaacggatagagccctttcagcccgccatttttattatccataaagaacccaaagtttgccccatgccggtcctcatttcccagaatataatctgccacctgcatgctgtaatagcggtcaggatccttttttctgataaaatcatactcattctcatcatgataactacagtaaacctggaaatcctcccatggcacgatcgccgtttcctcagaagaaatgatcttgcatttaacgattttctctccattgtcatagatttttttgatatgagcctcgtccgcgatctgttcaagcctgtacgattctgcttccttataatctacatgtggaattccaagggcatttaaaatcttactggccgccagttcttttttccctactttgtacagataaagcccatcatcttcccggatccacgctttcgctgccattccctgaacggtaagttccggtgtataaatcttctggactaccggccagaatgtcttgttcactccgagaagtgccgttgcggataccgccttttctaacggattccggaacaggctcacctgatcccaggtaagattctctcctgcttccttcagccagtaacagtccgaaagcgaggcaaaatggaacagccttgcaatcatatagggattgctctgactgatccggaaccctgccagcagcttcttggcattggtttttccaatattcatcgtccggttttctgtccagccatgcattacatcgtcataattaacacccggatagcgcagggatatcggaagcaaatcgtaatctaaaatcctgcagctatagttttctatttccaaaactggtatatctttcagcataatcataactttatccattacgaaccacctctcttattttacctgcgtgaaaagtctgtgtgtttcattataccatttcttctgcttatattctatttttttatctttctctgaatgattttctctcgacaggaatcaacagcaggttccttgaaaagttagtatctcaatcaaaagtcatcttttttctgtcttttggctatgacctgctcagatgtacacaatgcaaccacaaaatgcagttcgtagagatttattacaatcatcaccgtgtttctctggaagaattatatgaaagggcaatggcaaaagtaaaatgccgttctgcttgatttttccacctgtctgtaccatacttatcttattaacagacaggaggcttctcaatggattcaaaatttttagaggaactgcggcaaaaacatattcaaaacccgccgaaaggaatgacatccaaactggtcagaactatgtctgattctgatctgcttgatatgcatgaatttcttacagaggataatgacctggatgacgatgaatttgaaaaaggattttatattaaccttttttaaccaccgtctgtttactttgcccgtattttgcgtttttttcaactggttcaccatttggcgaactttcctattatagaaaaaagaccaagcaaaatatttccacctgatcttcttcaaaaccttatacatttctggttatcaccccgataaccaactaattaaaatctaccctgtttccataaattacttacactattctccgctccccaccccctctaaataaaaaacactttccaaaaactccgaaaaccgtcagccattcccctgatatctattaaaagccatttttccagcttaaaaacacagctcattttcccttttcatccacaagcgacatccgacagcacacttcgacattccccgtagaaggaaacatatccaccgcgcacaccttctccacccggtaccctctctcctggaacaccgccagatccctcaccaggctcgtcggcttacaggaaatatacacaatccggttcacgccatagtcaatgatcttccccagcgccttcggatgaatcccgtctcgcggcggatctagaatgattaaatccggcttctcctcaatctcatcgatgacttttaacacatcccctgctataaactcacagttttccagcccgttcatcttcgcgttctcttttgcggcctccacggcttcctccacaatctccactccgaccacttttttggcaaccggcgcgatcatctgggcgatcgtacccgtcccgctgtataaatcaaacactaccatgtcctttgtgtctccgacatagcttctggccttctcatacagcacctctgcccccagagagtttgtctggaagaaagagaacggtgaaatcctgaactttaatcccagcagctcctcataaaaataatcctgtccatacaaaatatcagtcttatcattcttcaccgcgtccgacagactgtcattccatgtatgcagaattccgacgatccggccgtttaacggaagagaaagcagacgctccgcaaatggcatcaaatccggttcttcttggcttgtcgtcactaaatccaccagtatttcccccgtctttaccgcgcggcgcaccagcaggtggcgcagatatcccgtatgctgcattttcttataaaatcccagccccagttcctcgaaataatccttggaggccttcaaaatctcacagaaatctgaatttacgatctggcagtctgtggtggtcactacatcgtaaaagcttccgcgccgatgcatccccagcgccatcggcccgtccttaaactcatctccaaacgaaaactccatcttattccggtatccgcagggctgcgggctcgccagaatcccttcaaattcataggaagcgcagacactgtcaagaagactcctcacctgcttttcctttatttccagctgcttctcataagggatcgtctgataaatgcatccgccgcaggttccaaaatggacgcacggcttttccgcagtctccagaggtgacttttctaacacctccacaatcttaccttccagccgtccgccccgcttcttcgtaatcatcacagacaccttctgccccggaagcgcgtgcttcaccgtgatttttccggattccgtcaccagcgtccctttatccggaaaatcaaatttctctattgtaccttcatatatctcgccttttttcacgttctctgctcctgttctcattgattatcaaccgctgtccgccgtttgccaaaaccggcttccattcttaccgccgcagcgcgcttccgcccaaagggcttctgacatcacaggaaccctttcctgtgacaccaaaaagcgtgtctcaatcgctgaggcacgcttcctttttctaactgtccttcttactgttcagaaccctcgcccggtgtatcatcttcgaagaaatcatcatcgaaatcatcgtcaaaatcatcttcaaaatcttctaaataatccggtgtgaagaaacggtaaaccgcatacgcaataccggcgactgccgctacagcaccaatgatggcaagtatccagagaatacagtttttcttcttttcgtcttcttctctcttgtgcagcaactcgttcagtctgcttgaatttacgagttcctctactctgttcatagcttctttgctcatcgtatcgaatctgttcatatcatccacgtcctttctgagagcctgtttcctataaatatgcggcagaaacgaaatctttctgtctgtcgttcttattataccattatctttatgcttttactatcttttttgatcatttttatttatttcaatttttataacgcttttgatttcctggattcttctcctgcgagccatcgatcagaccggtttcagcttcgcaaaggacgcgaacatcttcttgatccctgccttatcgaaacagaccgtaacctcatagtcttttccgccatccttgatctccaccacatttccctcaccgaactttatgtggcggacacggtcgccttccttataatccagggcacctgatttctgtacggtaaacgcctttccgaatgccggtttctgaaccggtgacgcagttttggaagcataggcattgctgcccggtccgaagctgctgacaccggcggccttattcccccaggtggtcggtctctgaccgccggaagcaccgcctccgctgcccgcggctccggctcccgaaccgccccaggagctaccgcctctcgcatttttgccgccctggccccagggcaaatcgctgtcatcaaaacgatcactcacacgctccgcgcgcgagtcaccgtaaccgtcagacgatttccggaaggaggacagccttggctccagcttatcacaatccagcaaatcagccgggatctcatcgacaaaccggctggtcttcgaataacgggtctccccattgatcattcgctgtttcgccccggtcagcatcaggaaatcctgtgccctggtaattccaacgtaacagagacgccgctcttcctcgatctcctccttgtcgtccgatgagatcgacatcatgctcgggaacaggccatcctccatgccgcttagatacactctcggaaactccagtcccttagcactatgtaacgtcatcagcgtcacccggttttccgagtcatccatacggtccacatccgcaaccagtgcaacctcctccagaaattcggagagcgttccctcgtcgtgatcccgctcaaagctgaccgctttattaattaactcctcgatattttccagacgggtctgatactcgatctcgccttcagcctccagctctttctgatacccggattcgtccagcacatcttcaatcagttcccggatcgagtaatcctcatagcggattctctcacggaaatcctcaatcagcgccgtaaacttaagtatcttatccgcagcctttcccagtcccggaactgcctgggcgcggcagaatgcgtcatacatgctgaaatcatgctccgacgcaaacgcctgtacctttcccacactggttcctccgattccccgcttcggaacattgataatacggagggcagataagtcatcccggccgttgtcaatcgtcttcaaataagccaggatatctttgatttcctttcgctgatagaagtttacgcctcccaccatacggtacggtacattgcgctgaaggcatttttcctcgataagacgggactgggcgttggtccggtaaagaaccgcgcagtcctggtagccgcatccgctgttctgaatatcgcgtacgatggcatccgcttcctcggcggccgtctcaaactgtttatactgtaccagaggcccttcctcattggccgtccacagcgtcttggactttcttccgcggttgtgacggattacctcgttggccgcatttaagatgttctggctggaacggtaattctgttccagcttgatcaccgccgcccccggatacgatttttcaaagtttaagatattgccgatgttcgcgccgcggaacttatagatggactggtcatcgtcgcccaccacgcagagattcctgtatttgccggccagcaggcttaccagcttaaactgggcggtattcgtatcctgatactcatccaccataatatatttgaagcgctcctgatagtaatccagtacctccggattattctggaacagctccaccgtcttcataatcagatcatcaaaatccaacgcattattcttcttaagctggccctgatactctttatagatctgcgctgctttcttctggcggaaatcgccgccggcgttcaactcaaactcagcggccgttaccagttcgttcttggccgtggatatgaggctcagcatcgcccggtctttataaagcttcggatctaactccagcgtctttaaaacctggcgcatcagcgttctctgatcatcggaatcatagatggtaaaattcgtcgtgtagccaaggctctcgatatggcgtcttaagattcttacgcaggaagagtgaaaggtactcacccagatgctctccgctccgaagcctacaatcttgtccacacgctccctcatctctccggccgctttattcgtaaatgtaatcgccagaatattccacgggtttacgcccttctcctcaatcagatatgcgatccggtgggtcagaaccctggtttttcccgagccggctccagccagcacaagaagcggtccttccgtgtggaataccgcttctctctgtacttcattcaatgtatcgtaaatgctcataaacgtataccgtcatttcctttcatcaatggtttgattcagccgggtatcctgttgtttcgattcccagatattttttaatatctgcaagctgttccaccgcaagacggcgtccgtcttcatagagtgcttccagcttctttctgtcctgttccgtcctcgacaccgtcaccggcttatccggacggatcacatagatccttcccgccttttccagctcgtcaatctcttcctgcatccggttatagcgttccggcgccttctccaaagatttaagcagccgcgggagcggtttgaagtagtgttcatacgcccgcctcgtccatttatccacaggctttttcctgtatccctgattcctggtaagtatgacaatgatcttttcatatccctcgtcgatggctctctgataagcaatcggcatggaacagccgccatctaaatatttcttcccatctacatcaatcatccgtgacagaatgggcaggctgctggaggcctttaccgcctctatgaaatcctcacacttccctttttcaaaatattccggttttcccgtcttacagcgggttgcaaccacctcaaaccgctgcttcgacgcctcaaacgtctcaaaatcaaacggaatcagtgtctcactcaattctccaaacagaaaatcaaaattaaaaatcgaacggttcttcaccatacttcgaaagctcataaaccgcttatcattcacgtagtccaaatccacccggatcgttcttccaatctgtttgctgatataactcattccgcacatagaccccgcggaaacaccgtttacataggacatctcgatcccctgctccataaatacatccagcactccggccgaaaatacacctctcagggaacctccttccagtactaaagctccttctgtcatcttattcacctcgcctcctattctattgcatttcctccccccggtcaatccctttataaaaatcccttgatccttcctatatgagttcccccgccagaacgtatttccatctcagcggtgccagtacccagccgaaaaagcagcgggcggcggtgccagggatcgttcagtgtgccggcatctggatacgagtcataaaaaagtccgggtctggcgaacacacccgccattggtgcgtacgccagacccggacttttttatggcgagtaggaagccagacggacacgaacgatccctggcgccgccgcccgctgttttttcggcgtccccttctatagaaactgactctgatacaactgataataagcccccttcctttccatcagctcctcatgacttcccgcttccatgatatttccctggtcaatcacaaaaatgcggtcggcctttcttatcgtagaaaggcgatgggcaatcacaaaggacgtgcgcccctcaagaagcgcctcgattcccttctgcaccagcagctccgtgtgggtatcgatgctggaagtggcctcgtccaggatcagaattccaggctttgacagcatggtccttgcaaatgccagcagctgccgctgtccgatcgaaagcctggcgcccctctcactgatttcggtgtcgtaaccgtgttccagcttcataataaaatcatgggcgtttaccgccctggccgcttccatcatctcctcgtccgtggcatccaggcgtccgtatttaatattatatttaatggtaccggaaaacaggaaattatcctgtgtcatgatacccatctgactcctcaggctcttaagcgtcacctttttaatgtcgtggccgtcgatcagcacccgcccgtccgtcgtctcatagaaccggctgagcagattcacaatcgtcgtcttccccgcacctgtggggcccaccagtgcaatggtctccccctggcggatatgaaaattcacatccttcaggatcatgcgctcaggctcatcgtcgtaggcaaaggaaacgtgttcaaaatccaccgttccctcaatttccggcagctccgccgcacccgggcagtcgcggattccggcttccgtatcgatgatatcgaatattcgctccgccgccgatatattggtagtcagcttgttataaaaattggcaaggttccggatcgggctccagaacatggcaatataggttgaaaaggcaagaaatgtaccgatgccgacctcccccacgccgatcacgcggatgccgataaaatacagcagaaatccgcccagcccccaggtgatctccaccacaggcccaaatccgtccgccacaacgacagcgtcgataaacgcccggtaatgctgatccaccagatcatagaatacggccctcgtctcccgctctgccgcaaagctctgaatcacccggatcccggagagatcctcatgcacataagcgtttaaattggaagtcttttttctgtaaatctgccaccgcttatgggccgtcgtctcaatcaccagcatccccaccaccagaatcggaagagtcagaagtgccgccatggccagcttgtaattcttaatcagcatgataaccgcgacacagaccaccgtgattaaatccgggatcagctgagtcacactgtctgacagcacatcctttaaggaattcacatcaccgatgattctggccagtatttttccggttggacggctgtcgaaaaatccgaagctcagcgtctgaatatgctggtacagctcgtctctgatatttaaaaggaccttgtttgaaacatccgacatgatgtacatgcggaccttggttccagccaggaagaagagaaacatcaccaccgccagagcccccagcctaagcagtccgttcacatctccggttgccacacagacattgatcgcgtactccatcatgataggagtcgccatgctgacggcaatcgttcccgccataatgagaagaactgccgctatttgctttttataaatcagaaggtaccggaacaaccggatgatcgtatcctttttcagtacttccttctgttcttcgtcgactctgcttgtatttactgacataactgtacctcctctccatactgcacctgataagtcctgtaatactgccccttcttcgccatcagctcctcgtgagtcccccgctcgatgattctgccgccctccagaatcagtatttcatccgcatggcgaaccgcggaaatccggtgggcgatgatgattttggaactgtccttctgcgtcttcaaacgacgctcaatctctttctcagtctccatatcaagcgccgacgtggaatcatcaaggatcagaaggggagtccttttggcaatcgccctggcgatgctgattctctgcttctgtccgccggaaagccccacgccgcgctctccgatcaccgtatcgtacttctctcccagcttcataataaaatcatgggcctccgcacagacagacgcttcctccacgctctcccactcggttgcatcccggtttccggtcttgatattgtccgtgatcgtgtcggaaaacagaaagacatcctgcatcaccaccgtggtctggctcctcaagagggacagcggcagcttccggatatcgatgccgtctaacagaatctctccgttcgtcacatcgtaaaagcgctgggttaagttgacaatcgatgtcttaccagacccggtcactcccatgatacccagtgttttcccctttttcagcgtaaaatcgatgtctgtcagaattctggaaccgtacagatcaaaatccacatgtttaaactgaagctctccctcgattttttcagggaccaccggggcatccggttccgtgatgtccggcttctgggccataatccttttgatcttcttattggaagccatggccgccgcaaagtcgttgctgagccatccgaccatctccatcggccagatgatattgttggcatactctgagaacgcccccagctctccgatggtgatacgtttttgaatcaccatgatgccgccgaccacgatgatcgccatcagcatcaccttggaaaggaaagacacgttaggctgatacttgacgatcagcttcgcctgctccatatttaaatcgtaataccgcttgttgtggcgtttgaaccggtcaatctcgtaatcctctctcgcaaacgccttcaccgtccgcacaccggccaggttctcctgagcgacggtattgagctccgccgtctgctcgctgatcttgtcgtagacctgaccgagaccattctccatctttaagccgtaccaggcgattaccggcatgacgagcagcggaatcacggtcagggcaggacttaagcgaaacatgcaggtcatgataattaccgtgtgaatggtacattcaatgatcagcatcccgacaaagcccatggcattccagatgcggtccacatcgtccttcacacgcgccatcagctctcccgtgttatgactgtcgaaatatcccatagacagtgtctgaatatggtcaaagagatcctttctcagcctgcttccgattcccgacgccgagtagtcgaaaataaattcttttacgtactggaaaatggctctcccaaagccaatccccagcagccccagcagcagccgcataagcagctccagcctgccgccgacaatgacatcatcaatgatgtgcctcgtgatctgaggtgacgctgcatccagcagtatgctcactaccatggccgcgatagccaccacgtaaaggatcccgtacttctttacatacttccctaaatttctcatgttgctcccccttttgtctcttttacgccatatgcggctgcccgcaaatctatcggcaaattgccgtgaaaaccatgaaaactacgaaaatcgcgaaaaagccgtcaaaaacagcaatttgcggcttttaacggcttttgaccataaaaataaccgcagtccagttcagactgcggcataatgattcaaattcagataacacactgacttccatacgatatcatggcagctcagagaccgaattctctcttaaggcagactgactgtttgttatgattgatcattccactgctaattctacaagatttcatagttctgcctccttttcctttaatcggtaatctagttactagaatactgccactttcctgttctgtcaagcactttctgtttttcagaaaaaacagttaatattccagcacaacttcgatcctgtcttttgcccggctgtaatagtaaactttttctgagagaaagtcctcatctgccggcatctccctgtttagattctttaaactttcctgtatcgtctcgggatataccttctcgcagttatggatcgccgcctcgtgcatactggtaaacgcaatgtacaagtcgttccccatcagctctcccagccgcttcgccactcccggcaggaagatggctaccgccccgtttatctgactcttcgtcgtgacaaacgtggcgcaggcgcccccgtccagtctgacctccgtatcccgttccataaaaataccgtagtccttatcccggaaccgctcgacctccagccagttgaacagacgcggaggaaagagcctgtaagtattctccatggcgtcgttcatcacctgttccctgctcttatcccagccctcgcataccaccttcggcaccatggaactcgtatacagaccaccgaaattcccgatgctcacgtaaagcgtcagagcaatatcccctgtcacctcgtaaacgccttcctccagcttctttgcatttctctcataattgaggggacggatcaccagatactcccgaatggcctcatagtcctccatatgacccaaaggactgcttttctcaatctctctgcagcgctccagacagtcggaagcctctgacagaagttcctccatccccttgcccagctggaaatcatggtagatctctgccatatggaaccgctggatatgggtcccggaaccgtctccgtttaactccaccaccagcagatcctccgcctcttctgcttcaccgcctttttgcagcgtgaccttcgcgccccattcctctgtcatcagaataaggaacgcctgaaactgctccacaaactccagatactcttttgtctctctctcttttttcatcgtgcattgcccttctctttcttaaatttcctgtaatcatgagaacttcatggattaaaggatttgtaagggaataaaaaatgcccggcatttcatggaaaatacgcgcagttctccttcgtcgggaacgcgcccaaaatacatgattccatctttcattatacgttttaagtgtaaaaattacaatactggaaacaggttgccgaaccggcagaacagaatcagaacttcagaatgatattattataaaccggaacagcggtactgtcaatgactacgtgctcataaaaccggatatttttcaacctagttttcaacaaaaacgccatttcaaacggccggcgcatgatctgccgccggccgtctgtcacagtcctttactctctgccgattacaaagctgaaggtaatatccttctcaccgcttacgcagtattccggatacaccggcgcaccccagctgtcgtctccgccgactccccgcatggccgccaggatattgacgaccgtataccggggctgaggcagttcctctatgtgggaggcatgctccagttcctccgccgtatagggaagaacggagccctcaaacgggcggccttctgcggtaaaccggatcgaatgccccgcttcgtccgtcaccttcagccacctgatgccggtgcggtttccgcattcctgcggaacaaggtaccgtgacacactgtctgccgccgtactcttatagattccgagacgcgcgccggcgtttctgtcacagtaattctcctcaggtccccgaccgtaccattcgaacccgccgcctgttccgctgatgcaaaatctcatgccgaaaagcggcagctccggcagaccctcccgtccaaagtaacgggccgttgttgttatcctgccttccccgtccacttcgtaaacgacctccgtcacagtctcaggcaccgtggccagtctgtaggtataggagacccgaacgcagtctttcccctcttccaccacacaggttttgctgtcgtaaagagggaagcttcctgccccgtaccacacggcgctggatacagagaatttattgcctctgtcgttatctgtcgttgctctccagtacacaggcatgggaagcttcccgatccattcccggccgtcatagacgagggacacgataccgccctcctgcttcgagaagatcacatggaagccatcgcccttcacgccgatattgacatcgccgtgtatcaccgtaaacggaacacttcccgcgtcagcacggttctccccggcgcattgatcatcgctgccaatcacccggcagctttcgccgaaggccgtctcatatcccgcagccgcccaccgttcctctcgctttaataccgcggatacctggtacacatactccccgggctctgtaagttcaggagctgatacgctgacgtattcccgctctcccggctttacctgcgcacagaatctctcagaatgcacgggaactccgtctctcagcgccagccagacaaattccaggtcggaagtatcggtgaacagtctcctgttttcaatctccgcaccgcccgcatccggaaccagcttaaggtcctggtagagagccttcacctcctgcgccttcggcgaaatggttctgtccgcatagacaatcccattgccgcagaaattataatcagtcggccggtcgttaaaatctccgccgtacgccatgtgttccacgccgttctcgtcagtcttcatcagggcctgatccacgtagtcccagatgaaaccgccctgatacatgggataccggtcctccagcgaggtgtatttctccatgccgcccagggaattgcccatggcgtgcatatattcacacaggataaacggcttctccggttccccctcaaggtacgcctccacctccgccggctttgcgtacatgcggctctccatatcgctggtctcattgaattcacggttccagaagacgccctcatagtgaaccagcctggacggatcccgctccttaaaatacttcgacatggcgagaatatcttcgcccgcgtacgactcatttccacaggaccagatcaggacggacgcatggttcttatcccgctccagcatggactttgcgcggtccaccacgcactccttccactccggaaggcttcccggcacgttccaggaaggctcacaggcccccatcttctgccaggagccatgactctccagattcgcctcgtcgatcagatagatcccgtattcatcacagagctcataccatcttgactggttgggatagtggcaggtacggaccgcattgatattgtggcgcttcatgaagcggatatcccacagcatatcttcttccgtgactgcacgtcctctccgcacatcgaactcatggcggttgatgccgcggaatacaatccgtttcccgtttaagcacatgaggcggtctttcatctcgaaacggcggaagcccagcttctggggaacgacctcgacgatcctgcctttttcatcgtacagaattacagtcagcgtatagagaaaggcgtcttccccgctccagagatgaacctccggcacgcttcccgcaaaggatatgttttccctggcaggcatgtgctcccagacggcggctgtatttccctcccggtcggtcagcagagccgagacactgcccttcctgctgccttccagcgtcagatccaccgtgagttctccggtctttaagtcttccagaactccgggatggacaaacatgtcacgcacatggcattccggcaccgcgtaaagatacacctcccggaaaataccggagaaccggaagaaatcctggtcctcgatccagctggcgctgcttctcttatagacctccaccgccagacggttgaccccatcctttacgaaatccgtgatttcaaattcagagggagtaaaggtatcctcggaatatccgacgaagcggccgtttacccatacgtaaaaggcgctctccactccctgaaaggacagaaacagcctcttattcttcagggccgcatccgtctcaaattccttcacatagcttccgacaggattatcctcccagtctacgtgaggcggcttaagctccgaatggccttcccacggatacatcgtgttaatatactgacatttcccatatccctgcagctctatatggccgggaaccgtaatttctccaaaatcaccgagacttctctcaggcagataaaaatcctttttccgctgcttcggctttggggcgtaggaaaatttccatgttccgtttaaggactgacgcagcttcatgatgccgctgtccgcctcctccctgctctcatagaaccggtggtcggaatgtgcctccaggcggtttaccgcaaacacctccggattctcgagccaggctaaatcggcatgatactgatccataaatatatcctcctttttcacgtctattatagggccgtccgccaaaagaatccatctctttttttacgattttctgcaattttctactctttgacagcaccggccgcaattcccgccaggatatatttctggaagaacagatagatcacgatggtcggcagcatgatgatgatgattcccgccgccaggttctgccaggagccctgctgggcgttggcataattcatcaggaacgtggtcagcgtccgcagcttgttcttcggcatatagaggtatggaatgtacatgtcgttgatgatggtaatcgccttgatgatcacgaccgtggccgtggccggagccagcagcgggaagataattctcgtaaacaggccgaaataggaacagccatccagcagcgcgctctcatctaaggatacgggaagcgtggagataaactggcggtaaatgtaaagctgcatcagatctgaggccacatagatgacgatcggcgcccccagcgtgttatacagccccagaccgttgataatcttgaagcgggcgatctctgtgacgaagcttggaatcagcatccccaggaaaaacaggctcataatcagctttttaaaacggaattgaaaccgctcaaggataaacgccgtaatggtgccgaataatacgttgaagaaaatgctgaaaacgagtatgatgcccgtatttttaaagccgatcaacaggtatttgtctcccagcaccttctggaagttatccgtggtcacacggcttaacggaggcagtaacaggggagaggtattaaccatatccgcctttgtcttaaacgcggcaaacagtgttaaaagaatcggagccagcacgatggataccatgcagaggcagatcacctgttttacaatttgctgcagtgtgcgctgtttcatcctttcttccctccttttaatacgattccgtggataatcttattctggaccacgtaaatgatgacgatcatgagcatgatagccaccgccatggtagaagccaggccgaagttgctgtatttgaacgccgtgtcaatggtatagagcgtgaaggtcgaggatgcataccccggaccgccgctggtcataacgtaaggaatatcgaatacctgaagcgcgccgcggatattgtcaaacaggacaaaatccaccatcagcataatggcaggaatctgaatgtatttgaacatctgccatgcgctggccccgtcaacccgggccgcctcctgcacatcctgcggaagggactgaagcgccgccataaacaggatcacgtgataccccgagaaacgccataaggaaacgcctgccagaacgaagttcacaatcttcgggtctgagagccagtttctgattaacggctctaaatggaacagagtcagaatctcatcaaaggctccgttgattggtgaaaagaaataggaaaatgcataggaaatcgccacgccattgatgatatacggcataaagaccatagtcttatagaacttcgcggcgcggagcttagaagtcagcaggacggcgaacatcagctcaatgggaataaagagcagatgaccgaagaaatagaccgcattgtttctcagtgactgccataaatccttgtttttcagcatgtcaaaatagttgccgatgccgatgtaatcgtacgtcttcgaatagccgtcccagttggtgaagctcattcggatcagatcgaaggccggtaccaccacaaagccgatcagaagagccatggggatgaccagggaactgatgataaatatctttttctgtctttccagtgaattcataactaacctcccggattggattgattttacggaatttggggtataaaaaggatggggcgtctgtacggaaaccccatcccctgttacagagtcttatttaattccaagttttgttcttgcttccgcccattttgcatttaaagtatcgagttctgcctttaaatcaaaaccttccgtaaacatctgagctcccagtttcttgtaatcgaaggcgatctcattctgaattgcctggaaatcatctccgccgccgtcatacataaccagttccatatcaggctgcagcgcgtcagcttctgccaggatcggatctttctccttcgggaaattcgtcatggaggaggcgctggttacatagttaatgtatccgggataccagtcttcgctgtagaaccactccacaaatgccttcgccagctccggattcttgctgtgtgtcgtcacgcccatgaaggagtcgccctgtacgatcacgcggaacggatcactggaggtatctctgaccggaagatagaaggttcccagctctgaatagtcatccgtaccggactggatgttctgtaatccccagtctccgagagccaggatggccgctttcttctgtgcaaacagcgcggttacctgatcgttgcccatgcccagaggatcttttccgaacacgtccatattgaagagctcattgaccttcgtataggccttgttgatatccgtcccctctgcgaacggcgcgtcggatttggccatatcgttccagttctggccgttgccgccctctaacgcaggcataaattccatataaggataatccggccattcatccttcgcaccgagggcgatcgccatgaaatccgggttgtcttttccgtagtaatcctgaagcgtctgcgccgtctgctcaaattcgctccatgtagtcggcaccgtcacgcccgcttccttaaacatgtctttccagtaaaatacgtattcgtagcctgctgtaagcggaacgcccaggatcttgccgtctaaggcatagcctgctgccagttcgttattcttcgtggcctccagatccgataaatcaacgagataatctttgaatctcgacagtgtgaacggtttgttaaacatgacatccggaagctggttggcggaagtacgcatcttcatggcgttccagtactcggaatcgtccttgatcttctccacttcgatttccgcatccggatacttctcctggaacttgcctaccatatcgttctgatcaatatagtccatcaggttgttgtcccagatggcaaataccagatttccctttaaatccgccccggccgcctccgtatcgggagccgctgttgtatccgtctgtccgcccgccgtagtggccgcgtcagccgcaggtgtcttttctgtctccttcgaagccgtggctgaacagcctgtcgccgctcccaccaccatcgccgcgcaaagtcctaatgccgcaatctgtttcttcatgtttcttacctcccttagtttgttgatggttcaagtttaccattttcatccacgcatctccatgaactaaggtttgaaaacttgatatatcgttaggtcttttatttccggtatgctcccgggctgacctgacagatctttttgaatactctcgtaaaatgttccacactgttataccccacactctggctgatctcataaattttcaaatcggtctgctccatcagctccctggccttccggatccgcacctcggttaagtagttgctgaaggtcattccctcctcctttgtaaaccgggagctgaagtatttctcatttaaccccacatagccggccacacttcccagcgtcagctccgggttggagtaattatccattataaagcgctttgccctgctcatcatatccgcctggcgccggtcattctgatgagccgcataatccatcacccagcggaaataattgttaagccacagttccagactccccatctcctccagccggccgattttctcgtaataattcaccttttccgcaaaaagggctccgatatcgtcgtgactctcgttcaggagccaagccagattacagatgaggcagaggatctccttctttgccgaagaaagcccgctcccgtagaaaactgcgatcagcttctgcttctcctccgaaaccgtcatctcatccgcggtcagaagccctgctgccagacgcttataccggctgaaggaattccttgcctctaagtagtccacgctgtccttctcccacgggctgcacactgccgctctccccttcagccagtggagagagagccagcccccggcttcctcgaacctggagagaaaatcccccgctccgcttcctctggtgctgattcccgctgagacgggaagatttaagaaattattccagacactgcacagctgtctgcaggtagaaaccgcattatcctgatactgtcccgcatccagaatccggtagagcatcacgtaacgcgacggagatatcgtccccagcacacaccgggagaccacccgcggaatctgagccgcaaactccagcagaggcctgatcagctttccttcaaaatccccggcaaatctcccggcatgcttctgaaattcatcgatttcaaactgcacgaccagatactcccctgccaggaattcctcatccagttcgcactttcccatggccatggcggccagacgctcagaatccgatattttttccctgctttcctccgcgctgttctgccttccggtctcttcttcactctcccactctccgttcagaccttccagcatatttttcagcagttctccgtttaaatcggccttaagcagatagtcgcaggcgccgagccggaaggcgtcccgcaccagcttaaaatcatcgtatccgctgaggaccagaaccttcggcataacatcaaaacggctgaccgcctccaaaagcccaatcccgtcgagaaccggcatcttcatatcgctgataatcaaatccaccgtatgattctttaaatactgaagcgccgcttccccgtggatggcgtctgccgcaatctgaaaccccagctcctcccagttaatgagagagcgaagggtaattcggattatcgtgtcgtcatctacaattaataccttcctcatattaatccctcccagccgccggaatccgcagaaccgtctccgtataccttccaacttcactccgtatctgaagtgtgcattcatctccgtagttcaaaacaagacgcgtattgacgttcgtcactccgatgcttacgtagtcttcattttccgcagtctcgttcgacagcagacggcggatttcctcctctgtcatcccttttccgttgtcgcggaccgtgatgtacagatattgatcctcaagacgggccttcaccgtaattttccccagttcctcttcctgcccggagaatccgtggacgatggagttctccacaatcggctggagaatcagccggggaaccatacagcttccgcagccttccccgatttcatattcgatctcaaaaccgtcggaatatcggatcttcatgagatagataaagccatccagcacttccagctcctcatccagagtataaaagcccacattgctccggaacgaacaggacaatatcttaatcagcgcctctgccatcctggcgatcgcctcatacctggacacctgtgcgataaatcggatggaatttaaggaatttaccagaaaatgcggattgatctgcgactgcagtgcccggatctccgcctcgtgtttcttctgctgttcctcttcgttctcctgcatcagctgcttcagccgcctcgtcatacggttgaaggaatgaatcatgacacggagttcagcctgtcccaccggaaccacatggacatccagcctgccctcctccaccagtctcatcccttccacggtgttgtggataggatcgatgatattctttaaaaagtaactggaaaacagatagaacaatccgaataagacgaccgttaccgccacgatcacagcggctatccgggtaaaatcccgggtcagcagctcggaatcgaccacgctgacggcaaggagccccgttaccggttcctcggagatgacatatacgtaattcttaccgtccagcttatggtgcagttctgtctctcctcccgagataatctccggaatgaagaagcgcatgccgtcgttgacgtcaaacaccggagtcccatccggatttaagagcatggtaacccccagcagcttctccttgttgtactcctttattaagtttccggtctgggacgatacaaaaagagccgccatctccaccacattatcgcggtccacgtcgatccccggggaaagtcccgccactatggtcagcatgtgggcttttcgcgaggccgtaacgtttctgtcgtaaaagccgactttcaccatatttttatcgttcagggcctgctggtaccaggacgcggccttgatctcctcgtccggcagaatgatatcgtccttcatataggtagattccccatccttcatataaaagacggcagataaaatatcctgtaccggaaccatggcgaagttaaaggactccgataacatacgcgccgcactgtaccgtttcgtaaagtcctgcgtatcggtcatcgccgcaattttcatgatttcattgtcattgacatagacgaaatgggacagccgcagggagacgtccttcacctcaccgcccagagtggctatgatattgtcctgggcgcgtttaatgctgcgggttgcagaatcgatcatcatcgtacggatgatggcgatagaaatgatgatgataagcagaatagggatgacaataagggcgagaaacgtgtgataataagaagccttcagattcttctttttattcagccacatcatttcccgccctccggttctgccaaatttgtaaatagtatttcatattatacaacagcaaaatcataaaatcaataaaacggctggtatttgtatgccttcttccttaaccatgcctgaggattaatccgccttcacaaacgtctcaatcctcgtctcaatccgtatcttctcccccctgcgaatcctgtacgcaacccgggtctttgacacccctaactataaaaatcagcgtgtaagccagtaatgacttatatttttttgtcaactttattgtttttatatataggctttttggtctttttgtggtatactatttagatagaggtgatcattatgaaggttagcatatcaaagtctaagaacgcagagtctttctatattaagcagtcttatattgacggaaatggaaaatctacatcaagaaccatacgaaagctcggtacattaaaagatttattagcggagcacggccctacccgtgaggatgtcatgaaatgggctaaggaacaggcacgtatcgaaacggaacggtatgaactggaaaaagaaagtcattgtatccccattgtatttcaccctaaccggaagattcctcatgggcagaggcgcaactttcaaggcggctacctcttcttacagtccatttactacgaattagggctaaaccggatctgcagaaaaatacgggacaaacatcactatacctatgatctgaatgcgatcctgtccgatctgatctatacaagggtgttagatcctggcagcaagcggtcctcctatgaagctgccaaaggatttttagaggcacctgcctatgaactgcacgatgtctaccgggctttgactgttctttctgaggaatgtgatcttattcaggcagaggtctataagaattcaaaatccattctggaacggaatgaccgggttctctattatgactgtacgaacttttactttgagatcgaacaggaggacggcaataaaaagtacgggaaaagtaaagagcatcgtcccaatccgattgtacaaatgggactttttacggatggagacgggatccccctggccttccgtctgtttccggggaatgagaacgaacaaaagtccttaaagcctcttgaaaaaaaggtcattgaggagtttggctgtgaacggtttatcttctgctcagatgccggtttaggctcagaaaacaaccggctctataaccacaccaggaaccgttcttatatcatcacacagtcgataaaaaaacttccggtggaatacagggaactggcgcttaaccgcaaaagattccgaaggctttccgacaaccggctcacagaccttgatacgatcacggaaaaggattctgatgagcttttctataaagaagagccatacagcaccaggaaaatggagcaccggctcctgatcacctattcccccaagtatgccgcctaccagagggaagtcagagaaaaacaggtggagcgggcaaaagccatgcttgcagatggaaatcataaaaaaacagggaagaatccaaatgatcccgcaagattcattggtaaatcagcagttacgaaagatggggagagcgcagacatccggtatgttctggatgaacaaaagattgtggaggaggcaaggtatgacggcctttatgccgtctgcacggatttatttgaagatgatccgggagagatcctaaaggtaagtgaacgcagatggcagatagagacctgttttcggatcatgaagacggatttttccgcaagacctgtatatgtacaaagagaagaccgcatcaaggcccactttctcatctgttttttggcattactcgtttaccggtgtttggagaacaagcttaataagcggtacagctgtgaggaaatcgtttctgccctaaaaggatttgcctttgcggatgtgcagggacaaggttttatccctatatacgaatccacgaacttgacagatgaactgcacaaaataagcggttttgaaaccgactatgaattcctcaccaaaagcaggatgagagagatccagaaattgagcaaaaagaagacaagctagttaaaatttataacgtttcccagaagcaagaaaaagactatatatcaaaacgaaacaacaccgctgtaaaaccctgatagaatgggcattatagcggtgttttgttaaaaagactgtcaaagacgggattatacaacagcaaaatcataaaatcaataaaacggctggtatttgtatgccttcttccttaaccatgcctgaggattaatccgccttcacaaacgtctcaatcctcgtctcaatccgtatcttctcccccctgcgaatcctgtacgcaaccgcaggaatggaggcgttcgcatagagcacattcgtattgggatcggccccgatcacgacgccggcagcctccggcccctcgccggatacggtacagccctgtttctcccaggacacggaggcggtctttccttccgctgactctccatacccttctgtaaacttctccacagcaaagccgcagtcataggcagtacagtcgtaatcactctccacctcgtggattctcatgtgtccgtactccgtcggtatcaccaccgaggtcactctgattcccggaaacgcctgccagtcgctgaccacccggtccgcaaagatatgataggattcgcttaccttcctgacaaacacgtaatcgtcgccgtcgattacgaaagccagcgcggaatccggcgcattctcatgaagcacgatctggctgcgggccacggaaaatccaaatttcgtggaatatgcaaatttagagtatttttccggcacatggccgtgaccgtatttttcacatacaccggccggataagcggtcacatcccttccgcgccgctgcacgatcatattggcctgaggcatcattttcacctctgccagagcaggaagcggcgccgcttccacgctccagaacggatgctcatccggcagcgccaggcacagaagcgtcttcattccccagtacggcgaccccggcgcattgtagcgctctgccataatcaggtttggatacgcgtagccgatggtcagcacgccgtcccggtcgaagatcttctgcccgcaccaccagttcaaatggcgggcgagaattccctttaccacagccacaggaatctcatcaagacctgcgaacacataggctgaccagaatgccgcctcaccgaaccggtaggacaggctccttccataaggaagcgccgccccatcctcatcgaaccagtagataaaatccccggcaaagatttcagcccgttccttaaaccgtgcgcatcgttccgggtcctcatcagccattgccacggaatacagaagtccatagtaatgcatggcaaatgagatataataatccttctgtcccgacgctccatcccggtaccagccgtcttccagatagtagctttcgatcttatccagaccggactgcagatttttcgcgtcatagcggcagccgttcttcttaagcgccacattgaccagaatcataaaaaactgccagttgcagtccggtatgatatgcccgttgatgccgtaaagccagtctgccaggtggttctgtccctcctcgccaagtggttcccagaccttttccggcgtaaagatcattccgctcgcgatggccgccatttccacgaaccgctggtcgtaatccgtaaagccgccccagtattccgggtgatccggatcggttccgttcttaagtcccttctggtaaagttcctcaaagccgtctcctccgcccttccagaagggaaccagagcccacagcggccgggaaaatgcttccatctcgatgctgacctccggataagttactccgctgtctcccagatgcagcctggctccgccctcgctgtacagtggttttaaaggattcagaacggaaaacatccagtcccggaaatcctgttttgtctctaatctcatgttccttccgcctcctctaccagtatggattccaatccttcgaaagtctcgtcagcgcttccatatagaagtaatcgccccagatgttacactcgtcgactccctccggagtacacgtattatatggagatttcttggagtaagtactgtgcaggaccagtccgttcgactcctccgggcttttaaccgcgtagttctccacgactgacttcattattttctcagcaagggaggtgtagtattttgcatcctcgtcctttaagtatctggccatttccagcattccgcaggcggcaatggaggcagaggaagaatcccggggctcaccggaaccgtctccgaattccagatcccagtagggcacaagatcctccggcagatgatccagaaaatatcccgttacatgcttaaaatcgtcgatatactcttcccgcttcgtgtagcggtaagccatcgccgtaccgtagactccccacgcctggcctctcgcccacgcggagccatcccggtacccctggcaggtcgccccgtgatcgggttccccggtctccatattcatgaaaaaggtatgccatgtggaatagtcctcacggatgacattggcgatcgccgtatggatatgcttctctgcgatatcccggtatttttcgtcgccggtctcctccgatgcccagtagagcagaggcagattcagcagacagtcgatgataaaccggtaattctccggctgatccatcggtccccacgcctgaataaattctcccgtcggatggtatctggtgatcagctgatccgccgccataacggccgccttttttccctgttcacttccaatcagcttatatcctgcgacgcaggaagggctgtagaggaagcccatgtcatggtgatccacatcctgcttcctctctattcgctgataaaagctgtcgatctgaatctctcccgcctgcttcagtgtctcatccccgctccattcataggccagccagatctggccggtccagaagcccgtcgtccagttgacattgggagtcggcctgtagaacccctcctcactgtacgccttcttaaaggaatgcgtaaattcttttagattttccttcacctgtcctgcggcaaaatccatggcctgacggcacgcctctttagacagctcattcttttccttcagacgcctgatggtctcctctttcatattccaaaacctccttgtaatagttctgcatcagataaaacgccggttttttccggctcctgtcctctgtcatcagtcccttgatgttatatcccttctggtactttcccagccgcttcggcgtccggaaatcaaacagaatccagggcgtcgttccctgaatatacggaatcttccggaacatggcaatctgattttcataaatctccatctgttcttttacagatcccctgacacaccccgcactgctgccagctgtcactccgcttccagcccgttcttcctcgccgccttcctcagccgcaaatgctccgtcagcgccgaattcgctgatgataaccggcttttccggcgcagactgttccagtatggtgcccagcttgctgtaatcgggatcgtaccagccgtaatactcgttgaggccgatcacatccagatgtgcctccagcctgtccgcgatccgcaggttcacagtgtccaccagacaggccgcggaaatcagtctggacggatcagattttctcgcatactccgccagatccgccataaaacggtaccgctcatccgtatccggattctcatttccaaccgaccagatgatgacgctggcccggtttgcatcccgcttcatcatctcgcccagctggctcttcgcctgcttccatgtatccggatttgcaaaatcgatccaccagtacacggggatttcctcccacagaagaaggccctcttcgtcggccagccgcgccgcccattcggtgtggggatagtgggccagacggacgaagttgcagttcatctcttttgccaggcaaaacgcctcccgtatctcagcctttgtgaccgcctttccgtgatccttggaatcctcatgaagacagacgcctcgcagaaacagcggccttccgtttaaaaggatggaacgcccctccgtctcaatggtccgaaagccaacgcggtccgtgatctggtcgatagcccggttctccccgtcatacagcgtaatcacgacggtatagagcctcggatgttcaggactccacagctccagctccggaaccttcagttttaggcaccccgtaccgtcggagttaaaatccatgatttcacagactccaatctcaggtatttcaaaaaatgcgctgaaatcagaaaaactgcttccggccgccccttccgccgtagcttccaccgtaatttcccgtccccgcctgccgcgcagtcccaccttcatatcctgaataaaaaactcaggaagacggacgagagacacactcctgtagattcctccatacgggaaccagtccgtgttgagagacggcacatccgcctgatgcctggtcccatccgccacgacaatcagccggttgtccccgccttccctcagattctttgtcgcctccacgcaaaaaggcgtggaaccgcctctgtgaacgcccaggaaacagccgtttaagaacacccgcgcctcgccggccaccgctccgaaccttataaatacccgctcatgttcccgtctctcataagaaaaccggcggctgtaaaccgccggtccctcatagtaaaaatattccggttttgcgagattgaagacgcccggaaccggtacggtttcccagtcgtcaaatgcatagtcgaggggcaccgtacgtccttcctcattcgttttctcctccaggtaccatttggcccgaaggcagttatcatacagatcgggtgagaagttccagagtccatccaggctctcttccgttctcccaccctgcataatcaggctttccgccccgattaagggagcggaataagcgtttttgtatgcctcattatgaatattatccacgaaatttttgatctcttccatcgaaaccggtcctttcctgatcagccctttacgccagtcgccgcgatgccttccacaaagtactgctgcagtgccaggaacacgatcagcaccggaattaaggacagtacggaggccgccataatcagtccgtattctgagctgtactggcttaagaacatcttcaatcccagctgaagcgtcttcttggcttccgttttcaaataaatgagcggccctaaaaagtcattccaggtattgacaaacgtgaagatcgtcagtgtggagagcgcaggcttggaaagcggcaacatgatctttgcccagatctgatactcattcataccatcgattctggccgcctcgcagagttcatccgggattccctggtagaactgtctcatcatgaacacgccaaaggcagagaatgcctggaggcagatgattgccagatgcgtatcgttcagcccgaagcgcctcatcatcatgaactgcggaaccatgtatacctgccacggtacggcgatcgttgcgatataggccaggaacagggcatttttatgtttgaaattcagctttgcaaacgcataggctgcgaagctgctggtcagcagctgcaggcatgtaacgattaatgtgatcttgatcgtatttaaaacgaatttcatgagcggaatcttcgtccagatgtctatgtagtttctccatctcggattctccggtatccactgaatcgggaaaataaatacgtccttgtctaactttaatgaggcagacagcatccatgcaaacggtaccagcatcagaaatgcaagggcaattaagactgcatagaggataacccggctgattttataatttgtgctttgtactttcatctctcttcctgccctccttaattcgcatacttcttctcaccacggaactgaatcagcgtgatgacaaggaccatcaggaacaataccatggcaaccgcgctggcgtaacccagattccagttacggaacgcttcctcgtaaatatggtagacgagaaccatggccgaggtgctgacgacaccgttggaaccgccggccagcatgtatacgatatcgtaaaccttgaaacagttaatcgttaaaataatcgtgacgaagaacgtcgtcggctgcagctgcggccatgtgatatagcggaaacgctgaagagaatttgcgccgtctaagctggccgcctcatagagctcggcgttaattccctgtaaacctgctaaatagatgaccatgtaatagcccatgttcttccacacggaaaacagcacgatggtgaacatgacccagtgggggtcggccgcccatttcggcaggctcttggcagatacgcccagctgatataaaatcatgttgacgggaccgctcttctggggactgaaaagcatgttccatacggcagccacggccaccagcgacgctacgtaggggaagaagctgacggtacggaagaaattccgtccctttaccttctgatttaacaggactgcaagtcccagcgcacaggccagcgtaaacggcaccgtcgcgagacagtagacgatcgtattgacaaaggaagcccggaatctggcgttcccaaccatctgtacaaagttcttaattccggcaaactccatggggctgttcccatcccacttcataaacgccagtacaaaagcaaagataatcggtcccagggtaaataccgcaaatccgatgaagttgggggcgataaaggaatatgccaccatgtttctcttttcctgtctggtaaaccgttctcccgtgcgaaccttcttaattttctcttctgtcgtctcaatctgagagatcagcttgtttctcttatgtgactgttctgtatttttaagctcacgctccagagcctcacgctttgtgagcagcgcggcaattttttcgtttttctgtgtttccgttaatgtcttagccaccggcttttcctccttttcctatttaccattccgtgattcgatttccaattcagaggggattctttaaatgaggcgggcttttattctgcccgcctcgtgatgtagcctgattgtcgtctgcgctttttattcagccaggatagcgcttacctgctcatccatctgtgtgattccgtcatcgacagagatgcttcctgtcatgattgcatcatgtgcttcgttcagtgcggtctcaatctcagagctcttcggatgtaccggcatttccagatacagatttgcagtatttaaagcgtctacactggtgtcgtcatccttcgggaaaccttctgttgcagataccaggttcgctacctcgtctgtcataacagccgggattgttccggttgctgccaaaacttccgctccctctgctccgcttacgaagtttacaaactcccaggccagatctttatgaggtgcgttggtcgggattgcgagagaggtgatggttgccagtgtggaaccggcctctacaccgtcagcatgaggatactttgcaattccccagtttgtgcagtctgtgtactcgcctgttttgatcttctcgatcagtgtggagatgaaccaggttcccatgttcatcatcgctacgttgccctgggcaaatgcgccggagtaatgaaggccgctggtctttaaagttgcgtaatcctggcatacgccgtcttcctgctctgcaagaaccatgtcgtagtatggctttaagaactcatactttccgtccagaatcgtattctttccatccaggataccgaacagctgaacggcagatctccatgtgtggtagtgagcgccgtatacttcctggcctggggtgtcaacggttacggatcttgccagcttgtcatactcatcgaatgtcatgtcgttggtaggataggcaactccggccttatcaaacacgtccttgttgtagaacagcacccagaagtcatttctgaatggaagctcgtataacttgccgtctaccgtgatctgatcagtcagtcccttgtactgagccaggtcgacgcctgagtctgctatgtagctgtcaagcggctccagcacgcccttgttcaccagggtcatgtatcccggaacatcctttacggttactacgtcgaagtcggagccatttcccgtaagctctgtggccagtacggtctggtaatcggtggatcccaagtctaccatttcaatggtaacatccgggtgggccttctcgaactcgtcgataagcggctgatagtaggtcgtggagctgatatcccagacagaccatttaagggttgtcttatctcctgaagccgcagccgtcgtatccgccggtgcctctgccttcgcagttgtctccgctgttgttccttccggtgcagctgttgtttccttgcttccgcttccgcagcccgccagtgtggtaaccaccatcgctcctgcaagtgcgagacttaatgctctttttttcattgtattccctcctgatttgaatttggtaaatagttcagccatgcatcttcttgttttcaaaaagcatgaaaacaagaagcccgggcgttccgccctatgtcagtttgaacaaaaaagtgcttatgcaagcaagctttcaacacacttttccgtccaaactgccgcatggctgaactgttaactaaattataaccggatcaccggcggaaaagaatggattttatctcataaaatattcattatttattcacaattatttcataacccccttggcaatgtacttttttacgattaataatacaatttctctattgtatacatattgcattgtttttcgtaaagtactattctgtttttcattgacaatttacaataaatagtctaattttgtatatagaaatctgcagagagaggaacttatccttatgataaagaaattttttcccagttcgatccgtggaaaaatcatggccgtaacggctgcaatcacggttctgattgccgtcatcaccatggcggtctgctactccgtgttccagtcttttctaatgaaaaaccagattcagtccacggaattcaacctttccgtcatcagcggcaacatggcggaggatatgaaggagattgtcacgttcaccaaatggtgctgctccaacagcgaggtcggccactatctggagcggctgaaggaccagccgaagctcccgacggcttccaaagacacggaggggctgcggccgctggccctgtccgcctataaaaggctgaatgaggaatacataacctccgggagcgccggcggaaagaaatatatggcccgcgtcatcatctccaccccaaacaccggcaacttcctgcagtcgatgaccagcgccaactactccagctccttcgacgcagcgcgggtcagcagcagcagcttttttgcgcccctgctggaaagctccgactttcgatggatcggagtggtggatgatccgatctccaatgccaatcatgaaaagatcattcccatcgtacggcccgtatacgatgaatacagcctggaggtcatcggctggacctatgtggaggtctcctcccgcctgtttacggactacctggcgtcctacccccaggccgacgacagccagctgtttttgacgatcggtgataaaacgtacggttcctccaggcgcacctgggacgatccctccatgccctataccgattttaagcctgtgaccggcactgccacgctggatcccggaacacaggtattttccgtggtctcaccggaaggggaaaagcggatgctggtccggcggcctgtcgaggtggaagggagtgacggctggtatctgtctcaggttttatcccggcagcagtttaaccagcagcgtatggtttacctcctgctgatcgtcgggatcagtgcggccatcatctccctcggctgtctgctgaccgttcttttaaataagatcatcagccagcccatcaaacggctcagcttaaagattgatgccatcgcggacggggatttctccagggacagcgagatcgaatggaaccacgaactgggctccatcggacgcggtatcaacaatatgtcggagaacatcgtcaccctgatggataagcgggtatcagacgaaaaacagaaaaaagatctggaataccagattctgcaaagccagatcaatccgcatttcctctataatacactgaattccatcaaatggatggccacgatccagaatgccaccggcatcgctgacatgacgacggccctggccagactgttaaagaatgtttccaagggaacctcctccatggtcacactgcgggaggagttggatctggtcaaggattattttctgattcagcagtaccggtacggtggaagcatcaccatggactaccacatcgaatcggacgagctctacgactgtgagatccaccgcttcacgctccagccaatcattgagaacgcgctgttccacggaatcgaaccgaagggaaccgcaggcgccatcacggtatccgtaacgtccgataccatgaatggaaagaaagtgctgaaaatcagcgtgactgacaacggagtcggtatgaccggagaaaccatcgaggccgtgcttcacgaggaggacagctccggaaaaaacaagactgatttcttccgccacgtagggatcagcaacgtaaaccggagaattcaatacgatttcggaccggaatacggaatcaccattgtcagcgaaccgggtgtctacacgaccatgacaattgtgcgcccttataagataaaggagacattatgataaaattactgattgtagatgatgagcctctggttcagatcgggatcaaatccatgataaactgggaggagtacggcatcgaggtctgcggtaccgccatgaacggcgccaatgccctggagctgattgaagaatactccccggagattgtaatcaccgacatccgcatgccgatcatgaacgggctggagcttgcaaaaacctgccgtgaaaaatacggcaggatccccctgttcatctttctgaccagctatgaggaattccagctgatcaaggaggccatgacctatgaggccgtcgattacttaatcaagctggaactgagtgcctcctccctggcagatgccgtgaagaaggcgaaaaaccggctggaaaaccttcaggccgttgtcaaagccaaagaccccggccgccctctgcttcagagctactacgacaaattcatccttcgcctgctgcacaacctcttcgattcggaagaacagttcctccttcaggcaaaggatttaaaactggcctttacggatgcctgctactgcgccgccctgtttgaaattcgggaggaagctcatgcagccatggaccacacaaagcttatgaatctctgcagcagcacattttccatggcccgggacattttgaacaaacaccttccctgttacgccatctctctggacatgaagcattttgccgtgattttccacgcggcgaagcaggaggacggaaacgccgcacagcttcagagcgcagtcaaaaatgcagtggagatggtccataattactttaacgtcaccgtgctggccggaatcggcaccccggtggaacagcccttaaagatctgcgaatcctatcaggacgcgcggcaggccttcggacgggcaaccaccacggctcccatcatccagttttcccaggatgacaccgagtccgtcaaaaacgcgttcaacatcgccgtgtttaaaaacgatatcaccaaggccttcgacgaattcgacaccgatgtcctctaccggacgctctccgagatcatcgaactgtttaaagcccatccgctccgtttccttcaggccgtggacggagcctgcaacattctctacctggcgctctccctgctgcccgacggcgaggaaaacatgatggagatcttctcctcctacagcgacggataccgctccatctaccgttttaccagcgtggaccagatcattgaatggatgatgatcctgcgcgacggattgtgcgaggtactaaaatccaagagaaagacgtacaaggctcacgtcatcacaaatgtgcagaaatacataggcagccatgtaaatgaacgcctctccctcaatgaggtggccggcgtcttcggactcagtccaaactacttaagcattttattcaagaaaaactgtcaggtcggcttctccgagtacatctcgcaggcgaagatcgcaaaggccaaaagcatgcttttggaacaggatatgaagatctacgaggtggcagacagactgggctttgagagcgctttttacttcagcaaggtatttaaaaaagtggagggcatctctccgcgagaatatatacagcaaaacaccatcggtcccgatggagaacaaggagacacactatgattgcagacacagctataactgagacatcattaaccgggacgcccatggcggcagccatgatcactgaggcggcccaaaagcttcacaagccgcttaccctgttcacgccctgccctccggcatctgacagggaatcctgggaaaagctttcggaagacttaaaagcacgtctgattaaaaatggagagcagtatctccactacgaatacccctccttaactgccgtggatttcatggaatttacacgcactggaaacaggagccgctaccaggaccggctgttcgccagacggaccgccttagataccctggtcctcgcggaatgtgtggaacaccgcggccgtttcctcgacgatatcatcaacggcctttacttaatctgcgaggaaaacgcatggcagcttccggcccacaactcctatatccgtgatacgccccagttcccgcttcccgacgtcacgaggcccatgatcgacttattcgcagccgagaccgcctccatcctcgctgtggcagaatatctgctgcgcagcgaattaaacgaagtaagccccttcctctctgtcatgatcggccacgaactggagacgcggatctttaccccctatctcgaagagcacttctggtggatgggcgatggaaagagccacatgaacaactggacggtctggtgcactcagaacgtgctgctctccgccttcaccaggcctctcccgagtgagacacagaccaggattctctgcagggcagccaggagcatcgactactttctggatgagtacggggaagacggctgctgtgatgagggcgcccagtattaccgccacgcaggactctgcctcttcggctgcctcgaaatcctgaacggaatcacggatcacgcattctcctttgcctggaagcaggaaaagatcagaaatatcgcctcctacatcctgaatgttcatgtggattcgatttattacgtcaatttcgcggactgctctcccgtggccggccgctgcaatgccagggaatatctgtttggtaagcggaccgataaccgggctttaatggaattcgccgcctccgattaccagaacagcgaggacccgcttacgctcgatgagcacaacctgttctaccgtcttcagaccgtgttctctcatgaggaaatgatggaatcagacagaaatcccgtaatcgctcataaggatctctattacgaaagcgtcggcctcttcatcgcccgcggcagccgcctctgtctcgccgtaaaaggcggcgacaacgacgacagccacaatcacaacgacgtcggcagcttcaccatatacaaagacggcaaaccgctctttatcgacgccggcgtggaaacctacacgaagaagaccttctccccggaccgttacgatatctggaccatgcagtcacggtaccacaacctgccttcctttacagatcacggcagggagacggtccagcaggacggcgggcgttaccgcgccgaagacgtccggtatgagctgggcgaagacgtctgccggatctccatggacatcgcgaaggcttatcctgacgaccgcatccgttcctacacacgcagcgccgtcctggacaaggagaaatccatcaccatccgggaccactatgaaggcgatggcggcacagccgtcctgtcgctgatgttctgtgagaagccgtccatccatcagaatacgatccggatcggcgatctcggcatctgtacagtggaaggcgcttcctccatcacgtcggaagagattccggttactgatgagcgtctgaaaacagcctggaaacacagtctgtaccgctgcctcgtcacgatggaggcccgcgatctgaccctgacgatcgcctgatgcgcggtgtaaggaggctgttcccttgaatataaccttgaaaaccattggcggccggattctggccgctgcaaaaaaagatgtgatactgaccgtttccctggtctgcgccgtcttttccatgtttctcgttccgccctcctccgcctatatcggctatgtggacttccgtgtcctggcgcttttattctgcctgatggtggtggtggccggatttcaggagtgtggtctcttcgtcctgatggcgaggaagctgctctccggcgagaataatttccggcagctctcgtggatgctggttatgcttcccttcttctgctccatgctgatcaccaacgatgtggcacttttgacctttgtcccctttacaatccttattctggacatgatcggtgaaaagaagcatatggcctggatcgtggtgctccagaccgtggcggcgaaccttgggagcatggcaactccggtgggaaatccgcagaacctcttcctgtacgggcgtttttctatcccggcaggccgtttcttcgcagtcctgctgcccctggccgcactgagcttcgtgctcctgaccgcagcagttttccgcattccgcggatctccatgcagatccgttttgatgcgccggaggtgacacaggaaaagcatgccagtcccgccgtctttttgttcctcttccttctctgtctcctgtccgtcttccgcattctggattaccggatcgcgctggcagtcaccgtagtctgcctccttctcttcgacaggaagctgtttaggaccgcggattaccttctgctcctcaccttcgtctgcttcttcctgttcgcaggcaatatggggcagcttcagggattaaagagctttatggcagaggttctgagccggaatccggtgctgttttctgcgctgacgagtcagttgatcagcaatgtgccggctgcggtgcttctctccggtttcacctccgactggaaatcgctccttctcgggacgaacctcggaggcctgggcacgccgatcgcctcgctggccagcctgatctctctgaaattttacataaaagaactgccagataaggtttcccattacctggcagtattcactgcgataaatatagcattctttctgattctgtacacggcggcctgcttcctgtagaagcggccctccgcagtacggagccatcgccgtactacggttctacataagcggggcaaacagccgcagcgcgcgtcccgccagcttcttataccacggataacgccggcactcctccagagtaatcacctggctctgcgccagcgtctccctaaagtctctctccacatcctgaatcacctcattgcggtaaatataagccgcacattcaaaatgcagatacaaacttctgtaatccatattgatcgtgccgactacggccttctcatcatcgctggtaaagacctttgcatgtacaaagcccggcgtatactcgtatatctgcactcccgccttgatcagttcctcataatgtgccttggccagcaggaacgcatagaccttgtccggaatgtgaggcatgataataatcgtctcgaccccccgcttcgccgcaaactgcagggcctgtaccagctcataattgagaatcaggtatggcgtcatgatatgtacatagcttctggcagtgttgataatatcgaggtacaccagctctcccaccgtctcctgatccagagggctgtcgccgtagggaatcacaaagccctccatggacagctccggcggatagaagaactccggatctcttaaataccttccgtaatcctccggttccctctccgtaatattccacatttggaggaacatcatcgtaaagctggtgaccgcatcgcccttcagcatgatgccggtatccttccagtggccgaagcgcaccttccggttgatatactcatccgccaggttaatgccgcctgtaaatgccgtgtggccgtcgatcaccaaaatctttctgtgatcccggttgttctggtaggtggacagggccggtctgatcggcgcaaacatcttcgcctttaggccctttgccctcagttcctttggatagctgtacggaaggaggacgaggcagcacatgccgtcgtacataaaccgcacttccacgccctctgacaccttgcgctccaggatctccaggatgctgtcccacatctccccgcgctccacgataaagtattccatgaaaatgaagcgtttcgccttctccagctcctttttcatgtcttcgaacatctcctcgcccagcgggtaatacttcacattggtgttgccgtagaccggatagctgccggagttttcaatataggcggccaggttcgcattgcttctgctgattcttgccagctgctccatgtaacggggattctgcttcagatacggctgggtagccgcgatattttcccgcagccttctgttaatgatctttccttcccactgcagctccaaaaagagataaagcagcgtgccgaacacgggaatcaccgtaatcggaatgatccacgccagcttaaagcttggattctcatccttatttatgacatagaggattacaaatgcgctgagcagcgtaaagcctccgtaaatatagaccatgtaatgactcaggaagcggaagcctgcaagcaggatcgagatctgcagcagcagcgacatcaccacaaacgcagtccgcccgaatatgatccttaaaagttttctagccttcttcatcctttgtctcctctcctgtatcaatcattacacatcgtatctctctattccagcgcctggcggatatcttcgataatatcatccacgttctcgatgccgacgctgaaacggatcatggaaggatccacaccagcctccaccagctgttcatcggtcagctgtctgtgagtatggctcgccggatgaagcacggatgtacgcgcatctgcaacgtgagtaacgatagccgccagcttcagacggtccataaatgcgacagccgcatcgcgtccgcccttaagtccaaaggaaatcacgccgcaggttccgtccggcatatacttctgagccagctcatagtacttgtctccctgtaatcccgggtagttcacccactccacgtcatcgcgggactttaagtattccgccacgcgaagcgcattctcacagtggcgcggcacgcgcagatgaagcgtctccagccccaggtttaaaaggaatgcgttcatcggggactgtatggagcctaaatcacgcataagctgagccgtggctttcatgatataagccatctttccgaacttctgtgtatagacaatgccgtgatatgactcatccggcgtggtcagtcccgggaatttctccgcatgggcctcccagtcaaaattgccgctgtccacgatgcagccgcccacgctggttgcatggccatccatgtactttgtggtggaatgggtcacgatatcggcgccccactcaaagggacggcagttaatcggagttgcaaacgtattgtcgatgattaacggtacgccgtgtctgtgagcagccgctgcaaatttttcaatatccagaaccaccagggccggatttgcaatcgtctctccaaaaacagcctttgtattcggctgaaatgccttctccagctcttcctcagacgcatcgggatccaccagtgtcgaatcgattcccagtttcttaagcgtcaccgtaaagagatttgtcgttccgccatagactgccgcggaactgatcacgtgatctcccgcctcacagatatttaagatggcgaaaaatgacgctgcctgtcctgaagacgtcagcatcgcggctgtgccgccctccagttcacatatttttgatgccaccgcgtcgttcgtcggattggctaagcgggtatagaaatatccctcatcctccaggtcaaacagccttcccatcttatcgctgtcgtcgtatttaaatgttgtactctgatagatcggaagtactctgggttctccgctctttggctgccatccgccctgaatacagactgtctctctggaacgcttcttctggctcatgattcttcctcctgtgttgttaaaacatattttctccctagtttatcacataattttccataattcaataacctggcctcgggagttgcgaaaacagcttgaactccatctccttttacagtataatatctaaatggaaaattttatcaatcacgcacaggaggtgcacatggataaatcaagggtttactacacaaattttcacaccacattttcagaaaacctgccgcagaaattaaaaagacttcttaaaacagccggaatagagcagattgattttcaaaacaaatacgccgctgtcaagatccattttggagaactgggcaacctctcctttctccgtcccaattacgcaaaggtcgtagcagacttaatccgtgaaaacggcggaaaaccgtttttgaccgactgcaacacgctctatgtcggaagccgcaagaacgccctggatcaccttgacaccgcttacgagaacggattctctcccttttcaaccggctgccacgttttaatcgccgacggcttaaagggcaccgatgaggcactggtccccatcgacggtgattacataaaggaagccaaaatcggccgtgccattatggacgccgatatcttcatctccctgacccacttcaagggccatgagagtaccggtttcggaggaaccttaaagaacatcggcatgggctgcggttcccgcgccggcaagatggagatgcataatgccgggaaacctcacgtagcgcaggagacctgcgtcggctgccacgcctgtgagagaaactgtgcccacggagccatctccttccaggagaaaaaggcctccattgaccacaaccgctgtgtcggctgcggccggtgtgtcggcgtctgtccggtggatgccgtggagacagactgcgacgagtccaacgacatcttaaactgcaagatcgcagaatatacgtatgcagtcgtcaaagaccgtccctgcttccatatcagccttgtcacagacgtatcgccaaactgtgactgccactcggagaacgatatcccgattatccctaacgtcggcatgttcgcttccttcgacccggtggctctcgatatggcctgtgtggacgctgtcaaccgccagccggtcattgccggaagcattctggaaaagcacggcagcaaacaccacgaccactttacagacgttcaccccgataccaactggaagactgcggtagaacacggagtaaaaatcggccttggaactaaggaatatgaactgattacaatttaagcgccgaacgcgttgtaatcagcggaatcaccgttacaatcaaaaagaatgcctgaaggaaacaggatcagaccacgatccccgatctccttcagacattctttttcatttatgactggtacctgcgctctctcccagcggaatcttatcccttccgatctgccacactgtaatatcggcatccgttacttttttctccggaatatttttggcaatgatcagctccggccacacaaaggtggtctccaccgcctttccatccaggcagattctggaataaggcgtaaaattttctccgtacaccagaatattggaatcgttatacacgatatcgtcgatggtgatgggatcgattcccatctgtaaatccgtggtctgatagggattttccccgccgtagacctcccggtctccgtacaggatatcgtattccagcgccttcatatcagccagatacgtttcctcatcctccatgccgccgtttagataattctggtggaagcgcatcatggttccctcatgtattcccagcatgtccagcacatgggccgccagctgatacgcctccacatccattctcttcttgggaagattcatgttgttccagaccacatattccgtctggtacagggatttgttgatcatctcatccgccgtccattcgaagctggggaggtgatcgccgtacatgacgaggacgatcggttcctcccgcgttcggagcgtattgacaagcgaacggataaaatcatccatctcatgaatctgctcacagtaatactcaaaatccggatacttcccgtgtccctgcaccgatatggtataaataaagtccggaccttcagtggaatccagggttttaatgatctccttaaccagaatcttgtccctgcaccatccggccggattcctctcaatattgttcatgtactcaatcggcgtaaacgtatcgaacccgatctgggcaaacacattgttccggtcataaaacgtcgcctcattgttatggatggcgtgagccgaatagccgagattctttaaatcgaaggccacactctcacaggaggtctttttcagcacggtcttatagggatactcccccggtccgaaaaagtccagattcatccccgtgatggcctcaaattccgtattggcagtccccgcacccacggaaggcacattcaaatatccgtggggataactcttctgaagccggtgaaaaaacgggatgggatcgtagtcctcctccgtaccggatttcagattgcccgtcaccggattcttcttccacagcagcggatcgaaaaacgattccagctggatcataataacgtttggtttcgtatttgccgagacggcgtatgtattttccggaacaagctcttccgccttaatcccctcaatcgtctccgtcccgtaatcctcgggcttcgagattcccgtattaaacatggaattggcaaagcagtagggaaacccgtacatctgaaacgcttccccgatgttgccgaagcgcacggccaccagcccggtattcatggcggccgtcgtcagccccagaaccactgccgcgctgatccccacgaccaccgcgctcctgacgaagcttaccttttcccggctgaccggcgcagcccgccatacgagcacgcagaagaccaccaccaccaccagggccgccccaatcataaccagctgcatccaggtaaaatacgtagtcgcaatgttggccgcatacttaatcagcctgaaatccgctgccgtaaacggagtcgtcctgaaaatcaggagtatcccgttcacaactcccagccccagccagaggatcgacagcacgattgccccaaacaccctgcgcttcgtaaaaaacagcaccgtaaacgggagggcgatgatacacgtattcaaaaggaagaccagcgggctttccagcacataggccaaaagcacagtaagcgacttcctgctgataaactcaatcaaaaaatttaaaacagccgccagaaccagtatcttccccagccgttttccatatgccttcatggcggatctcctttgtacctcatcgtacttcaaatctttagaaccggatttagtctaccacactttacttaaaatttacatacctgtttgtaaaaattaggaaaattgtaaaggacggcatactgccgcccacaaaatgaaccgtaacatgacgaagtgctgcgcaggatatcccgcacagcacttctgttactttcactctttttgtttttcatcaatactcttctgtcggaacgaatgcatcctcttccgccgcaggaacaccggccggacgttcagattcttcctcggcagccgcctcttcttccgccgcggcgttcacgtcttcactctccgcagcctcttccttgatgggcgcgccgcatttgccgcagtaaagggaatccttcggaacctttgcaccgcagaccgcacagatccggcttccttcactctgggtcagttcgatctccagagccgcaatccgttccctgcacgtcttaacggcatcgtacaccttggtataggcttcttccggctcacggttggattcataatagatccttccgatcgcggcgtaggcttcctccagcttcgtcttctccgtgctgatctgtgtctttaactgtatcgtctccgtaagtgccttagcctttgtagccacttctttgccggtatccgtaagggtcttacccagttcttccaaaaatgccatacgtagttcctcctttgacttgtcgctcttatcattttatcgtcattggaggaaaaagtcaatcaaagactgtttccacttctttgttaaaccgttccgactccctctttaagaattccggctgatctgccttccgtatgctgtattcatggctggtctgaccgctggtgtctttaatcacggcggtaaagacaatccggttctcctgttcattgaagggattaaagtttgcataatcctccagtctggccgtctccatcaaggcagccagctcctcctgatccgtaacggtaagctgggaaacgttctccttatcgtagtacctgccgctgtcatcgtctgccagctggtaaagatcgatatccgcccttactacctcgcccgtgccgattccgtcgttcagttctattccgcactccttaagcagtccgatcgtcttccggaaagacgggtaaaccggataataccctctgtcaataccactgttgtatctccaggcataagtatcctgatcctttaatttttccgccataacctggtcgttggtcataaactggatctgggcgatcggattttccctctccatgaccgctgaagtcagggcggccatctcttcctgataagtgcttaacatcagatcgacgtaatccgtctctccgctgccgccgcgcgtcacttccctggtccagctgctctgcttcaccctgatcttcccggtatactccgcagtctgttccatcaccggataagccgccatgcggtaatcccggctgtcatagattttcttaacaagatcatattccttattaccgtaaacggaataggaccggtatacttctctgccgttcttcagattgtacttgacggagaagctgatgtaacgatttccatactctgaattccactcgttatcatgtctcttctccctttccacctggctgaccgcatcggaaacgagagccagcaccgtgtctgtatcggtaatccgcatccgcgcgaaaagataatcactgggggactcataatcccagtaataagagccgtcgtccagtttcgcgcttccgtaatccacccagtattccatattgttcagggaaactgccaccgactccagagactccggctttggtatgtatttatcatatccaaataaatcgaactggaagccgaagaacaccagggcggcacaaagtccgcacaccgccatggagatcctgctggagaacagttttctgaaatcgaaatggtagataatttcgatcgtacagtgtgacagcagcagaccgcagatcagtccaaacactgcccagccgatactgtcatgcagataccagaagaacagtcccccgcagagcgcggacaggatcacgaccggaatgcggatgatatgctggcttaccttaaaggccatggcttttccggctgcctcagaccccctcatgcggtaaagcaggaccgaaaccgcggtaaccgctgcagtgacaagaatgacggcgccgattcttaagatctggctccggccgttcgttccattcataaaggcagagtaattgctgacatacagggtaaaggcagagcttttatccagcagtctgtatgcgatacggctgcctccgtgataactggttttaaagaattcctgatacagagcgtccaggagcagaagcagagccggaaaatacagatgaagtacgccggttcccagaattcccaccagaatattgccggtcagcaccatggccagaacggtcacggaatacagcatcacaaaatgaaggaaaaggaagcctgacgccccgaatgccgccggaatcacgtctcccggtgcgattccgttcaccatggcaaccagtaaacccagaagtaaattaaccgcataggcaaaaaacaggatcagcgccccatccaggtaatttacgaaaaacagcttctcacgtcttacgggcagcgaatggtagaaatccactttttttctggaatgcagccaggaaaagctggtaacccccaaaatcagggacagcagcacgataatcacagcgataaacccattattgaaaccaagtaccgaccgggcgctgtgcagcatgccctgatacgattcctccatgtttctgctttcgctgagagttaaagccacagccaccggcagagaaaagaagaaggttaagaaggtcagggccaccgcccagaggcgccgttttaaatcctccctcatcagattaaagaataagttttttgatgtcatatccagccacctccgtctcactgataaatatctcttccagggacaatggaataatctcataaaataccggagcataggactctatcacgcgttccgcctcttcccggcttcccctcacggtaatggtgatgagtctgcctctccgctccgtcttaagccgttcaaaagccactaagtcgtccgcatccattccctctctcaatacacactggatcttatgaatattgagtttcatatcatccagatcctttgacagcaggataccgcccttgtgaaggagacccacatgatcacagatatcctccagctcccgcaaattgtgggaagcaataatgggagtcagattcctctccgccatatctcccgcaaataagctttttaccgcctgcctcatcacagggtccaggccgtcaaacgtctcatcacagaacagataatccgtattcgtacagattccgcagatcacagacagctgtttcttcatgcctttggaaaacgtattgatctttcttctgccgtttaattcaaaaccggccagcagtttgtgaaatctggtcttatcaaacttcggatagacacggctgtaaaactccatcatctccagaggcgtcgcattgctgaaaaaatactgctcatccgatatgtagaagaaccgctgtttgacctcttccctctcgaatacattctcaccgtcgatcgtgacgctcccctcatcaggctttagaacgccgctcatcatccttaaaaatgtgctttttcccgccccgttggttccgattaaaccgaatacggaagcatctttgatctccgcattaatatg
